(19) United States
(12) Patent Application Publication
(10) Pub. No.: US 2024/0190962 A1
(43) Pub. Date: Jun. 13, 2024

(54) IMMUNOCYTOKINES AND USES THEREOF

(71) Applicant: Immunowake Inc., Birmingham, AL (US)

(72) Inventors: Ellen WU, Birmingham, AL (US); Xiaoyun WU, Birmingham, AL (US); John WAKEFIELD, Birmingham, AL (US)

(21) Appl. No.: 18/269,203

(22) PCT Filed: Dec. 23, 2021
(86) PCT No.: PCT/US2021/073107

§ 371 Date: Jun. 22, 2023

Related U.S. Application Data
(60) Provisional application No. 63/130,339, filed on Dec. 23, 2020.

(51) Int. Cl. C07K 16/28; A61P 35/00; C07K 14/54; C07K 14/55; C07K 14/555

(52) U.S. Cl. CPC C07K 16/2818; A61P 35/00; C07K 14/5434; C07K 14/55; C07K 14/555; C07K 2317/53; C07K 2317/92; C07K 2319/30

(57) ABSTRACT

The present application relates to immunocytokines comprising a cytokine or variant thereof positioned at the hinge region of a heavy chain of an antibody (e.g., full-length antibody), or positioned at a hinge region between an antigen-binding fragment (e.g., ligand, receptor, or antibody fragment) and an Fc domain subunit or portion thereof, methods of making, and uses thereof.

### CROSS REFERENCE TO RELATED APPLICATIONS

[0001] This application claims priority benefit of U.S. Provisional Patent Application No. 63/130,339 filed Dec. 23, 2020, the content of which is incorporated herein by reference in its entirety.

### SUBMISSION OF SEQUENCE LISTING ON ASCII TEXT FILE

[0002] The content of the following submission on ASCII text file is incorporated herein by reference in its entirety: a computer readable form (CRF) of the Sequence Listing (file name: 754392000640SEQLIST.TXT, date recorded: Dec. 23, 2021, size: 1,037,246 bytes).

### FIELD OF THE INVENTION

[0003] The present invention relates to immunocytokines comprising a cytokine or variant thereof positioned at the hinge region of a heavy chain of an antibody (e.g., full-length antibody), or positioned at a hinge region between an antigen-binding fragment (e.g., ligand, receptor, or antibody fragment) and an Fc domain subunit or portion thereof, methods of making, and uses thereof.

### BACKGROUND OF THE INVENTION

[0004] Cytokines are key regulators of the innate and adaptive immune system that enable immune cells to communicate with each other. Cytokine therapy for activating the immune system of cancer patients continue to be a key area of interest for clinical cancer research. A significant challenge for cytokine monotherapy is to achieve effective anti-tumor responses without causing treatment-limiting toxicities. This dilemma is well exemplified by the low response rates and notorious toxicities of IL-2 and IL-12 therapy. High doses of IL-2 are found to induce vascular leak syndrome (VLS), tumor tolerance caused by activation-induced cell death (AICD), and immunosuppression caused by the activation of regulatory T cells (Tregs). These severe side effects often restrict optimal IL-2 dosing, which limits the number of patients who successfully respond to the therapy. IL-12 has demonstrated modest anti-tumor responses in clinical trials, but often accompanied by significant issues with toxicity (Lasek et al., Cancer Immunollmmunother., 2014). IL-12 treatment was found to associate with systemic flu-like symptoms (e.g., fever, chills, fatigue, erythromelalgia, and headache) and toxic effects on bone marrow and liver. Dosing studies showed that patients could only tolerate IL-12 under 1 μg/kg, far below therapeutically effective dose. Either used as monotherapy or in combination with other agents, IL-12 failed to demonstrate potent sustained therapeutic efficacy in clinical trials (Lasek et al., 2014).

[0005] Several approaches have been taken to overcome issues with cytokine monotherapy. Recently, NKTR-214, a recombinant human IL-2 conjugated with polyethylene glycol (PEG; “IL-2-PEG”), has shown promising results in animal models. IL-2-PEG offers two benefits.

[0006] First, steric hindrance of PEG masks the region on IL-2 that interacts with IL-2 receptor a (IL-2Rα) subunit responsible for activating immunosuppressive Tregs, biasing activity towards tumor killing CD8+ T cells (Charych et al., Clin Cancer Res., 2016). Second, the conjugation of PEG greatly improves plasma half-life and inproteolytic-stability and decreases immunogenicity and hepatic uptake (Chaffee et al., J Clin Invest., 1992; Pyatak et al., Res Commun Chem Pathol Pharmacol., 1980). Targeted delivery of cytokines (e.g., IL-12) to tumor sites by localized injection or by use of immunocytokines (cytokines fused to antibodies, antibody fragments, or ligand/receptor-Fc fusion protein) have also been developed to overcome side effects of cytokine therapy. Immunocytokines can target cytokines to cells or tissues of interest, such as tumor cells or immune effector cells (Klein et al., Oncoimmunology, 2017; King et al., J Clin Oncol., 2004).

[0007] The disclosures of all publications, patents, patent applications and published patent applications referred to herein are hereby incorporated herein by reference in their entirety.

### BRIEF SUMMARY OF THE INVENTION

[0008] One aspect of the present application provides an immunocytokine comprising: a) an antigen-binding protein (e.g., antibody, or ligand/receptor-Fc fusion protein) specifically recognizing a target antigen; and b) a cytokine or variant thereof, the antigen-binding protein comprises an antigen-binding polypeptide (e.g., heavy chain, or ligand/receptor-Fc fusion polypeptide) comprising from N′ to C′: an antigen-binding fragment (e.g., antibody fragment, ligand, or receptor), a hinge region, and an Fc domain subunit or portion thereof, and the cytokine or variant thereof is positioned at (e.g., at the N-terminus of, at the C-terminus of, or within) the hinge region.

[0009] In some embodiments according to any one of the immunocytokines described above, in the presence of binding of the antigen-binding protein (e.g., antibody, or ligand/receptor-Fc fusion protein) to the target antigen, the activity of the cytokine or variant thereof increases at least about 20% (such as at least about any of 30%, 40%, 50%, 60%, 70%, 80%, 90%, 100%, 200%, 300%, 400%, 500%, or more) compared to that in the absence of binding of the antigen-binding protein to the target antigen.

[0010] In some embodiments according to any one of the immunocytokines described above, in the absence of binding of the antigen-binding protein (e.g., antibody, or ligand/receptor-Fc fusion protein) to the target antigen, the activity of the cytokine or variant thereof positioned at the hinge region is no more than about 70% (such as no more than about any of 60%, 50%, 40%, 30%, 20%, 10%, 9%, 8%, 7%, 6%, 5%, 4%, 3%, 2%, 1%, 0.9%, 0.8%, 0.7%, 0.6%, 0.5%, 0.4%, 0.3%, 0.2%, 0.1%, or 0%) of that of a corresponding cytokine or variant thereof in a free state.

[0011] In some embodiments according to any one of the immunocytokines described above, the cytokine or variant thereof is a cytokine variant, and the activity of the cytokine variant in a free state is no more than about 80% (such as no more than about any of 70%, 60%, 50%, 40%, 30%, 20%, 10%, or 5%) of that of a corresponding wildtype cytokine in a free state.

[0012] In some embodiments according to any one of the immunocytokines described above, the antigen-binding protein (e.g., antibody, or ligand/receptor-Fc fusion protein) comprises two antigen-binding polypeptides (e.g., heavy chain, or ligand/receptor-Fc fusion polypeptide) each comprising a hinge region, and only one antigen-binding polypeptide comprises the cytokine or variant thereof positioned at the hinge region. In some embodiments, the antigen-binding protein comprises two antigen-binding polypeptides each comprising a hinge region, and each antigen-binding polypeptide comprises a cytokine or variant thereof positioned at the hinge region.

[0013] In some embodiments according to any one of the immunocytokines described above, the immunocytokine comprises two or more (e.g., 2, 3, 4, or more) cytokines or variants thereof, and the two or more cytokines or variant thereof are positioned in tandem at the hinge region of the antigen-binding polypeptide (e.g., heavy chain, or ligand/receptor-Fc fusion polypeptide).

[0014] In some embodiments according to any one of the immunocytokines described above, the cytokine or variant thereof is a monomeric cytokine or variant thereof (e.g., IL-2, IFN-α such as IFN-α2b). In some embodiments, the cytokine or variant thereof is a dimeric cytokine or variant thereof (e.g., IFN-γ, IL-10, IL-12, or IL-23). In some embodiments, both subunits of the dimeric cytokine or variant thereof are positioned in tandem at the hinge region of the antigen-binding polypeptide (e.g., heavy chain, or ligand/receptor-Fc fusion polypeptide). In some embodiments, the antigen-binding protein comprises two antigen-binding polypeptides each comprising a hinge region, and one subunit of the dimeric cytokine or variant thereof is positioned at the hinge region of one antigen-binding polypeptide, and the other subunit of the dimeric cytokine or variant thereof is positioned at the hinge region of the other antigen-binding polypeptide.

[0015] In some embodiments according to any one of the immunocytokines described above, the two or more (e.g., 2, 3, 4, or more) cytokines or variants thereof are the same. In some embodiments, the two or more (e.g., 2, 3, 4, or more) cytokines or variants thereof are different.

[0016] In some embodiments according to any one of the immunocytokines described above, the antigen-binding protein is a monospecific antigen-binding protein (e.g., monospecific antibody or ligand/receptor-Fc fusion protein). In some embodiments, the antigen-binding protein is a multispecific antigen-binding protein (e.g., multispecific antibody or ligand/receptor-Fc fusion protein).

[0017] In some embodiments according to any one of the immunocytokines described above, the target antigen is selected from the group consisting of TIGIT, PD-1, PD-L1, PD-L2, CTLA-4, CD3, CD4, CD8, CD123, CD25, and HER2.

[0018] In some embodiments according to any one of the immunocytokines described above, the cytokine or variant thereof is selected from the group consisting of IL-1, IL-2, IL-3, IL-4, IL-5, IL-6, IL-7, IL-8, IL-9, IL-10, IL-12, IL-15, IL-17, IL-18, IL-21, IL-22, IL-23, IL-27, IL-35, IFN-α, IFN-β, IFN-γ, TNF-α, TGF-β, VEGF, erythropoietin, thrombopoietin, G-CSF, M-CSF, SCF, and GM-CSF. In some embodiments, the cytokine or variant thereof is selected from the group consisting of IL-2, IL-10, IL-12, IL-23, IFN-α, and IFN-γ. In some embodiments, the cytokine or variant thereof is IL-2 or variant thereof. In some embodiments, the IL-2 variant comprises one or more mutations at a position selected from the group consisting of L18, Q22, F24, K35, R38, F42, K43, E61, P65, Q126, and S130 relative to a wildtype IL-2 comprising the sequence of SEQ ID NO: 1. In some embodiments, the IL-2 variant comprises one or more mutations selected from the group consisting of L18R, Q22E, F24A, R38D, K43E, E61R, P65L, Q126T, and S130R relative to a wildtype IL-2 comprising the sequence of SEQ ID NO: 1. In some embodiments, the IL-2 variant comprises an R38D/K43E/E61R mutation, an L18R/Q22E/R38D/K43E/E61R mutation, an R38D/K43E/E61R/Q126T mutation, an L18R/Q22E/R38D/K43E/E61R/Q126T mutation, or an L18R/Q22E/R38D/K43E/E61R/Q126T/S130R mutation relative to a wildtype IL-2 comprising the sequence of SEQ ID NO: 1. In some embodiments, the IL-2 variant comprises the sequence of any one of SEQ ID NOs: 2 and 251-254. In some embodiments, the cytokine or variant thereof is IFN-α or variant thereof. In some embodiments, the IFN-α variant comprises one or more mutations at a position selected from the group consisting of R22, L26, F27, L30, K31, D32, R33, H34, D35, F36, S68, T79, K83, Y85, Y89, R120, K121, Y122, Q124, Y129, K131, E132, R144, and E146 relative to an IFN-α comprising the sequence of SEQ ID NO: 3. In some embodiments, the IFN-α variant comprises one or more mutations selected from the group consisting of L30A, K31A, D32A, R33A, H34A, and D35A relative to an IFN-α comprising the sequence of SEQ ID NO: 3. In some embodiments, the IFN-α variant comprises the sequence of any of SEQ ID NOs: 4-9. In some embodiments, the IFN-α variant comprises an L30A mutation relative to an IFN-α comprising the sequence of SEQ ID NO: 3. In some embodiments, the IFN-α variant comprises the sequence of SEQ ID NO: 4. In some embodiments, the cytokine or variant thereof is IFN-γ or variant thereof. In some embodiments, the IFN-γ variant comprises one or more mutations within one or both IFN-γ subunits at a position selected from the group consisting of V5, S20, D21, V22, A23, D24, N25, G26, H111, and Q115 relative to a wildtype IFN-γ subunit comprising the sequence of SEQ ID NO: 10. In some embodiments, the IFN-γ variant comprises one or more mutations within one or both IFN-γ subunits selected from the group consisting of S20A, D21A, D21K, V22A, A23S, A23E, A23Q, A23V, D24A, D24E, N25A, N25K, and H111D relative to a wildtype IFN-γ subunit comprising the sequence of SEQ ID NO: 10. In some embodiments, the IFN-γ variant comprises one or more mutations within one or both IFN-γ subunits selected from the group consisting of S20A/D21A, D21K, V22A/A23S, D24A/N25A, A23E/D24E/N25K, A23Q, and A23V relative to a wildtype IFN-γ subunit comprising the sequence of SEQ ID NO: 10. In some embodiments, one or both subunits of the IFN-γ variant comprises the sequence of any of SEQ ID NOs: 11-17. In some embodiments, the IFN-γ variant comprises an A23V mutation within one or both IFN-γ subunits relative to a wildtype IFN-γ subunit comprising the sequence of SEQ ID NO: 10. In some embodiments, the one or both subunits of the IFN-γ variant comprises the sequence of SEQ ID NO: 13. In some embodiments, the two subunits of the IFN-γ or variant thereof are connected by a linker. In some embodiments, the IFN-γ variant comprises the sequence of SEQ ID NO: 19. In some embodiments, the cytokine or variant thereof is IL-10 or variant thereof. In some embodiments, the IL-10 variant comprises one or more mutations within one or both IL-10 subunits at a position selected from the group consisting of N21, M22, R24, D25, L26, R27, D28, A29, F30, S31, R32, H90, and S93 relative to a wildtype IL-10 subunit comprising the sequence of SEQ ID NO: 20. In some embodiments, the IL-10 variant comprises one or more mutations within one or both IL-10 subunits selected from the group consisting of R24A, D25A, L26A, R27A, D28A, A29S, F30A, S31A, and R32A relative to a wildtype IL-10 subunit comprising the sequence of SEQ ID NO: 20. In some embodiments, the IL-10 variant comprises one or more mutations within one or both IL-10 subunits selected from the group consisting of R24A, D25A/L26A, R27A, D28A/A29S, F30A/S31A, and R32A relative to a wildtype IL-10 subunit comprising the sequence of SEQ ID NO: 20. In some embodiments, one or both subunits of the IL-10 variant comprises the sequence of any of SEQ ID NOs: 21-26. In some embodiments, the IL-10 variant comprises an R27A mutation within one or both IL-10 subunits relative to a wildtype IL-10 subunit comprising the sequence of SEQ ID NO: 20. In some embodiments, the one or both subunits of the IL-10 variant comprises the sequence of SEQ ID NO: 23. In some embodiments, the two subunits of the IL-10 or variant thereof are connected by a linker. In some embodiments, the IL-10 variant comprises the sequence of SEQ ID NO: 28. In some embodiments, the cytokine or variant thereof is IL-12 or variant thereof. In some embodiments, the IL-12 variant comprises one or more mutations within the p40 subunit at a position selected from the group consisting of E45, Q56, V57, K58, E59, F60, G61, D62, A63, G64, Q65, and C177 relative to a wildtype p40 subunit comprising the sequence of SEQ ID NO: 30. In some embodiments, the IL-12 variant comprises one or more mutations within the p40 subunit selected from the group consisting of Q56A, V57A, K58A, E59A, F60A, G61A, D62A, A63S, G64A, and Q65A relative to a wildtype p40 subunit comprising the sequence of SEQ ID NO: 30. In some embodiments, the p40 subunit of the IL-12 variant comprises the sequence of any of SEQ ID NOs: 31-34. In some embodiments, the IL-12 variant comprises an E59A/F60A mutation within the p40 subunit relative to a wildtype p40 subunit comprising the sequence of SEQ ID NO: 30. In some embodiments, the p40 subunit of the IL-12 variant comprises the sequence of SEQ ID NO: 31. In some embodiments, the IL-12 variant comprises an F60A mutation within the p40 subunit relative to a wildtype p40 subunit comprising the sequence of SEQ ID NO: 30. In some embodiments, the p40 subunit of the IL-12 variant comprises the sequence of SEQ ID NO: 33. In some embodiments, the p40 subunit and the p35 subunit of the IL-12 or variant thereof are connected by a linker. In some embodiments, the IL-12 variant comprises the sequence of SEQ ID NO: 36, 275, 331, or 332. In some embodiments, the cytokine or variant thereof is IL-23 or variant thereof. In some embodiments, the IL-23 variant comprises one or more mutations within the p40 subunit at a position selected from the group consisting of E45, Q56, V57, K58, E59, F60, G61, D62, A63, G64, Q65, and C177 relative to a wildtype p40 subunit comprising the sequence of SEQ ID NO: 30. In some embodiments, the IL-23 variant comprises one or more mutations within the p40 subunit selected from the group consisting of Q56A, V57A, K58A, E59A, F60A, G61A, D62A, A63S, G64A, and Q65A relative to a wildtype p40 subunit comprising the sequence of SEQ ID NO: 30. In some embodiments, the p40 subunit of the IL-23 variant comprises the sequence of any of SEQ ID NOs: 31-34. In some embodiments, the IL-23 variant comprises an E59A/F60A mutation within the p40 subunit relative to a wildtype p40 subunit comprising the sequence of SEQ ID NO: 30. In some embodiments, the p40 subunit of the IL-23 variant comprises the sequence of SEQ ID NO: 31. In some embodiments, the p40 subunit and the p19 subunit of the IL-23 or variant thereof are connected by a linker. In some embodiments, the IL-23 variant comprises the sequence of SEQ ID NO: 39. In some embodiments, the linker comprises the sequence of any of SEQ ID NOs: 194-242, such as any of SEQ ID NOs: 227-229.

[0019] In some embodiments according to any one of the immunocytokines described above, the cytokine or variant thereof is positioned within the hinge region of the antigen-binding polypeptide (e.g., heavy chain, or ligand/receptor-Fc fusion polypeptide).

[0020] In some embodiments according to any one of the immunocytokines described above, the Fc domain subunit or portion thereof comprises a knobs-into-holes (KIH) mutation.

[0021] In some embodiments according to any one of the immunocytokines described above, the antigen-binding protein is an antibody specifically recognizing the target antigen, the antigen-binding polypeptide comprising the hinge region is a heavy chain of the antibody, and the cytokine or variant thereof is positioned at the hinge region of the heavy chain. In some embodiments, the antibody is an anti-HER2 antibody comprising: i) a VH-CDR1 comprising the sequence of SEQ ID NO: 188; ii) a VH-CDR2 comprising the sequence of SEQ ID NO: 189; iii) a VH-CDR3 comprising the sequence of SEQ ID NO: 190; iv) a VL-CDR1 comprising the sequence of SEQ ID NO: 191; v) a VL-CDR2 comprising the sequence of SEQ ID NO: 192; and vi) a VL-CDR3 comprising the sequence of SEQ ID NO: 193. In some embodiments, the antibody comprises a VH comprising the sequence of SEQ ID NO: 150 and a VL comprising the sequence of SEQ ID NO: 151. In some embodiments, the antibody comprises a light chain comprising the sequence of SEQ ID NO: 154, (i) the cytokine or variant thereof is an IL-2 variant comprising the sequence of SEQ ID NO: 2, and the heavy chain comprising the IL-2 variant positioned at the hinge region comprises the sequence of SEQ ID NO: 156; (ii) the cytokine or variant thereof is an IFN-α variant comprising the sequence of SEQ ID NO: 4, and the heavy chain comprising the IFN-α variant positioned at the hinge region comprises the sequence of SEQ ID NO: 157; (iii) the cytokine or variant thereof is an IFN-γ variant comprising the sequence of SEQ ID NO: 19, and the heavy chain comprising the IFN-γ variant positioned at the hinge region comprises the sequence of SEQ ID NO: 158; (iv) the cytokine or variant thereof is an IL-10 variant comprising the sequence of SEQ ID NO: 28, and the heavy chain comprising the IL-10 variant positioned at the hinge region comprises the sequence of SEQ ID NO: 159; (v) the cytokine or variant thereof is an IL-12 variant comprising the sequence of SEQ ID NO: 36, and the heavy chain comprising the IL-12 variant positioned at the hinge region comprises the sequence of SEQ ID NO: 160; or (vi) the cytokine or variant thereof is an IL-23 variant comprising the sequence of SEQ ID NO: 39, and the heavy chain comprising the IL-23 variant positioned at the hinge region comprises the sequence of SEQ ID NO: 161. In some embodiments, the antibody comprises a second heavy chain not comprising the cytokine or variant thereof positioned at the hinge region, and the second heavy chain comprises the sequence of SEQ ID NO: 155. In some embodiments, the antibody is an anti-CD3 antibody comprising: i) a VH-CDR1 comprising the sequence of SEQ ID NO: 85; ii) a VH-CDR2 comprising the sequence of SEQ ID NO: 86; iii) a VH-CDR3 comprising the sequence of SEQ ID NO: 87; iv) a VL-CDR1 comprising the sequence of SEQ ID NO: 88; v) a VL-CDR2 comprising the sequence of SEQ ID NO: 89; and vi) a VL-CDR3 comprising the sequence of SEQ ID NO: 90. In some embodiments, the antibody comprises a VH comprising the sequence of SEQ ID NO: 91 and a VL comprising the sequence of SEQ ID NO: 92. In some embodiments, the antibody comprises a light chain comprising the sequence of SEQ ID NO: 94, (i) the cytokine or variant thereof is an IL-2 variant comprising the sequence of SEQ ID NO: 2, and the heavy chain comprising the IL-2 variant positioned at the hinge region comprises the sequence of SEQ ID NO: 96; (ii) the cytokine or variant thereof is an IFN-α variant comprising the sequence of SEQ ID NO: 4, and the heavy chain comprising the IFN-α variant positioned at the hinge region comprises the sequence of SEQ ID NO: 97; (iii) the cytokine or variant thereof is an IFN-γ variant comprising the sequence of SEQ ID NO: 19, and the heavy chain comprising the IFN-γ variant positioned at the hinge region comprises the sequence of SEQ ID NO: 98; (iv) the cytokine or variant thereof is an IL-10 variant comprising the sequence of SEQ ID NO: 28, and the heavy chain comprising the IL-10 variant positioned at the hinge region comprises the sequence of SEQ ID NO: 99; (v) the cytokine or variant thereof is an IL-12 variant comprising the sequence of SEQ ID NO: 36, and the heavy chain comprising the IL-12 variant positioned at the hinge region comprises the sequence of SEQ ID NO: 100; or (vi) the cytokine or variant thereof is an IL-23 variant comprising the sequence of SEQ ID NO: 39, and the heavy chain comprising the IL-23 variant positioned at the hinge region comprises the sequence of SEQ ID NO: 101. In some embodiments, the antibody comprises a second heavy chain not comprising the cytokine or variant thereof positioned at the hinge region, and the second heavy chain comprises the sequence of SEQ ID NO: 95. In some embodiments, the antibody is an anti-PD-1 antibody comprising VH-CDR1, VH-CDR2, and VH-CDR3 of a VH comprising the sequence of SEQ ID NO: 102, and VL-CDR1, VL-CDR2, and VL-CDR3 of a VL comprising the sequence of SEQ ID NO: 103. In some embodiments, the antibody comprises a VH comprising the sequence of SEQ ID NO: 102 and a VL comprising the sequence of SEQ ID NO: 103. In some embodiments, the antibody comprises a light chain comprising the sequence of SEQ ID NO: 106, (i) the cytokine or variant thereof is an IL-2 variant comprising the sequence of SEQ ID NO: 2, and the heavy chain comprising the IL-2 variant positioned at the hinge region comprises the sequence of SEQ ID NO: 108; (ii) the cytokine or variant thereof is an IFN-α variant comprising the sequence of SEQ ID NO: 4, and the heavy chain comprising the IFN-α variant positioned at the hinge region comprises the sequence of SEQ ID NO: 109; (iii) the cytokine or variant thereof is an IFN-γ variant comprising the sequence of SEQ ID NO: 19, and the heavy chain comprising the IFN-γ variant positioned at the hinge region comprises the sequence of SEQ ID NO: 110; (iv) the cytokine or variant thereof is an IL-10 variant comprising the sequence of SEQ ID NO: 28, and the heavy chain comprising the IL-10 variant positioned at the hinge region comprises the sequence of SEQ ID NO: 111; (v) the cytokine or variant thereof is an IL-12 variant comprising the sequence of SEQ ID NO: 36, and the heavy chain comprising the IL-12 variant positioned at the hinge region comprises the sequence of SEQ ID NO: 112; or (vi) the cytokine or variant thereof is an IL-23 variant comprising the sequence of SEQ ID NO: 39, and the heavy chain comprising the IL-23 variant positioned at the hinge region comprises the sequence of SEQ ID NO: 113. In some embodiments, the antibody comprises a second heavy chain not comprising the cytokine or variant thereof positioned at the hinge region, and the second heavy chain comprises the sequence of SEQ ID NO: 107. In some embodiments, the antibody is an anti-CD4 antibody comprising: i) a VH-CDR1 comprising the sequence of SEQ ID NO: 67; ii) a VH-CDR2 comprising the sequence of SEQ ID NO: 68; iii) a VH-CDR3 comprising the sequence of SEQ ID NO: 69; iv) a VL-CDR1 comprising the sequence of SEQ ID NO: 70; v) a VL-CDR2 comprising the sequence of SEQ ID NO: 71; and vi) a VL-CDR3 comprising the sequence of SEQ ID NO: 72. In some embodiments, the antibody comprises a VH comprising the sequence of SEQ ID NO: 73 and a VL comprising the sequence of SEQ ID NO: 74. In some embodiments, the antibody comprises a light chain comprising the sequence of SEQ ID NO: 77, (i) the cytokine or variant thereof is an IL-2 variant comprising the sequence of SEQ ID NO: 2, and the heavy chain comprising the IL-2 variant positioned at the hinge region comprises the sequence of SEQ ID NO: 79; (ii) the cytokine or variant thereof is an IFN-α variant comprising the sequence of SEQ ID NO: 4, and the heavy chain comprising the IFN-α variant positioned at the hinge region comprises the sequence of SEQ ID NO: 80; (iii) the cytokine or variant thereof is an INF-γ variant comprising the sequence of SEQ ID NO: 19, and the heavy chain comprising the IFN-γ variant positioned at the hinge region comprises the sequence of SEQ ID NO: 81; (iv) the cytokine or variant thereof is an IL-10 variant comprising the sequence of SEQ ID NO: 28, and the heavy chain comprising the IL-10 variant positioned at the hinge region comprises the sequence of SEQ ID NO: 82; (v) the cytokine or variant thereof is an IL-12 variant comprising the sequence of SEQ ID NO: 36, and the heavy chain comprising the IL-12 variant positioned at the hinge region comprises the sequence of SEQ ID NO: 83; or (vi) the cytokine or variant thereof is an IL-23 variant comprising the sequence of SEQ ID NO: 39, and the heavy chain comprising the IL-23 variant positioned at the hinge region comprises the sequence of SEQ ID NO: 84. In some embodiments, the antibody comprises a second heavy chain not comprising the cytokine or variant thereof positioned at the hinge region, and the second heavy chain comprises the sequence of SEQ ID NO: 78. In some embodiments, the antibody is an anti-CD8 antibody comprising VH-CDR1, VH-CDR2, and VH-CDR3 of a VH comprising the sequence of SEQ ID NO: 114, and VL-CDR1, VL-CDR2, and VL-CDR3 of a VL comprising the sequence of SEQ ID NO: 115. In some embodiments, the antibody comprises a VH comprising the sequence of SEQ ID NO: 114 and a VL comprising the sequence of SEQ ID NO: 115. In some embodiments, the antibody comprises a light chain comprising the sequence of SEQ ID NO: 117, (i) the cytokine or variant thereof is an IL-2 variant comprising the sequence of SEQ ID NO: 2, and the heavy chain comprising the IL-2 variant positioned at the hinge region comprises the sequence of SEQ ID NO: 119; (ii) the cytokine or variant thereof is an IFN-α variant comprising the sequence of SEQ ID NO: 4, and the heavy chain comprising the IFN-α variant positioned at the hinge region comprises the sequence of SEQ ID NO: 120; (iii) the cytokine or variant thereof is an INF-γ variant comprising the sequence of SEQ ID NO: 19, and the heavy chain comprising the IFN-γ variant positioned at the hinge region comprises the sequence of SEQ ID NO: 121; (iv) the cytokine or variant thereof is an IL-10 variant comprising the sequence of SEQ ID NO: 28, and the heavy chain comprising the IL-10 variant positioned at the hinge region comprises the sequence of SEQ ID NO: 122; (v) the cytokine or variant thereof is an IL-12 variant comprising the sequence of SEQ ID NO: 36, and the heavy chain comprising the IL-12 variant positioned at the hinge region comprises the sequence of SEQ ID NO: 123; or (vi) the cytokine or variant thereof is an IL-23 variant comprising the sequence of SEQ ID NO: 39, and the heavy chain comprising the IL-23 variant positioned at the hinge region comprises the sequence of SEQ ID NO: 124. In some embodiments, the antibody comprises a second heavy chain not comprising the cytokine or variant thereof positioned at the hinge region, and the second heavy chain comprises the sequence of SEQ ID NO: 118. In some embodiments, the antibody is an anti-CTLA-4 antibody comprising VH-CDR1, VH-CDR2, and VH-CDR3 of a VH comprising the sequence of SEQ ID NO: 125, and VL-CDR1, VL-CDR2, and VL-CDR3 of a VL comprising the sequence of SEQ ID NO: 126. In some embodiments, the antibody comprises a VH comprising the sequence of SEQ ID NO: 125 and a VL comprising the sequence of SEQ ID NO: 126. In some embodiments, the antibody comprises a light chain comprising the sequence of SEQ ID NO: 129, (i) the cytokine or variant thereof is an IL-2 variant comprising the sequence of SEQ ID NO: 2, and the heavy chain comprising the IL-2 variant positioned at the hinge region comprises the sequence of SEQ ID NO: 131; (ii) the cytokine or variant thereof is an IFN-α variant comprising the sequence of SEQ ID NO: 4, and the heavy chain comprising the IFN-α variant positioned at the hinge region comprises the sequence of SEQ ID NO: 132; (iii) the cytokine or variant thereof is an INF-γ variant comprising the sequence of SEQ ID NO: 19, and the heavy chain comprising the IFN-γ variant positioned at the hinge region comprises the sequence of SEQ ID NO: 133; (iv) the cytokine or variant thereof is an IL-10 variant comprising the sequence of SEQ ID NO: 28, and the heavy chain comprising the IL-10 variant positioned at the hinge region comprises the sequence of SEQ ID NO: 134; (v) the cytokine or variant thereof is an IL-12 variant comprising the sequence of SEQ ID NO: 36, and the heavy chain comprising the IL-12 variant positioned at the hinge region comprises the sequence of SEQ ID NO: 135; or (vi) the cytokine or variant thereof is an IL-23 variant comprising the sequence of SEQ ID NO: 39, and the heavy chain comprising the IL-23 variant positioned at the hinge region comprises the sequence of SEQ ID NO: 136. In some embodiments, the antibody comprises a second heavy chain not comprising the cytokine or variant thereof positioned at the hinge region, and the second heavy chain comprises the sequence of SEQ ID NO: 130. In some embodiments, the antibody is an anti-PD-L1 antibody comprising: i) a VH-CDR1 comprising the sequence of SEQ ID NO: 243; ii) a VH-CDR2 comprising the sequence of SEQ ID NO: 244; iii) a VH-CDR3 comprising the sequence of SEQ ID NO: 245; iv) a VL-CDR1 comprising the sequence of SEQ ID NO: 246; v) a VL-CDR2 comprising the sequence of SEQ ID NO: 247; and vi) a VL-CDR3 comprising the sequence of SEQ ID NO: 248. In some embodiments, the antibody comprises a VH comprising the sequence of SEQ ID NO: 137 and a VL comprising the sequence of SEQ ID NO: 138. In some embodiments, the antibody comprises a light chain comprising the sequence of SEQ ID NO: 140, (i) the cytokine or variant thereof is an IL-2 variant comprising the sequence of SEQ ID NO: 2, and the heavy chain comprising the IL-2 variant positioned at the hinge region comprises the sequence of SEQ ID NO: 144; (ii) the cytokine or variant thereof is an IFN-α variant comprising the sequence of SEQ ID NO: 4, and the heavy chain comprising the IFN-α variant positioned at the hinge region comprises the sequence of SEQ ID NO: 145; (iii) the cytokine or variant thereof is an INF-γ variant comprising the sequence of SEQ ID NO: 19, and the heavy chain comprising the IFN-γ variant positioned at the hinge region comprises the sequence of SEQ ID NO: 146; (iv) the cytokine or variant thereof is an IL-10 variant comprising the sequence of SEQ ID NO: 28, and the heavy chain comprising the IL-10 variant positioned at the hinge region comprises the sequence of SEQ ID NO: 147; (v) the cytokine or variant thereof is an IL-12 variant comprising the sequence of SEQ ID NO: 36, and the heavy chain comprising the IL-12 variant positioned at the hinge region comprises the sequence of SEQ ID NO: 148; or (vi) the cytokine or variant thereof is an IL-23 variant comprising the sequence of SEQ ID NO: 39, and the heavy chain comprising the IL-23 variant positioned at the hinge region comprises the sequence of SEQ ID NO: 149. In some embodiments, the antibody comprises a second heavy chain not comprising the cytokine or variant thereof positioned at the hinge region, and the second heavy chain comprises the sequence of SEQ ID NO: 143. In some embodiments, the antibody is an anti-CD25 antibody comprising VH-CDR1, VH-CDR2, and VH-CDR3 of a VH comprising the sequence of SEQ ID NO: 162, and VL-CDR1, VL-CDR2, and VL-CDR3 of a VL comprising the sequence of SEQ ID NO: 163. In some embodiments, the antibody comprises a VH comprising the sequence of SEQ ID NO: 162 and a VL comprising the sequence of SEQ ID NO: 163. In some embodiments, the antibody comprises a light chain comprising the sequence of SEQ ID NO: 165, (i) the cytokine or variant thereof is an IL-2 variant comprising the sequence of SEQ ID NO: 2, and the heavy chain comprising the IL-2 variant positioned at the hinge region comprises the sequence of SEQ ID NO: 169; (ii) the cytokine or variant thereof is an IFN-α variant comprising the sequence of SEQ ID NO: 4, and the heavy chain comprising the IFN-α variant positioned at the hinge region comprises the sequence of SEQ ID NO: 170; (iii) the cytokine or variant thereof is an INF-γ variant comprising the sequence of SEQ ID NO: 19, and the heavy chain comprising the IFN-γ variant positioned at the hinge region comprises the sequence of SEQ ID NO: 171; (iv) the cytokine or variant thereof is an IL-10 variant comprising the sequence of SEQ ID NO: 28, and the heavy chain comprising the IL-10 variant positioned at the hinge region comprises the sequence of SEQ ID NO: 172; (v) the cytokine or variant thereof is an IL-12 variant comprising the sequence of SEQ ID NO: 36, and the heavy chain comprising the IL-12 variant positioned at the hinge region comprises the sequence of SEQ ID NO: 173; or (vi) the cytokine or variant thereof is an IL-23 variant comprising the sequence of SEQ ID NO: 39, and the heavy chain comprising the IL-23 variant positioned at the hinge region comprises the sequence of SEQ ID NO: 174. In some embodiments, the antibody comprises a second heavy chain not comprising the cytokine or variant thereof positioned at the hinge region, and the second heavy chain comprises the sequence of SEQ ID NO: 168. In some embodiments, the antibody is and anti-PD-1 antibody with reduced (reduced at least about 2, 3, 4, 5, 6, 7, 8, 9, 10, 20, 50, 100, 1000, or more fold) binding affinity to PD-1 compared to nivolumab. In some embodiments, the antibody is an anti-PD-1 antibody comprising VH-CDR1 and VH-CDR2, and VH-CDR3 of a VH comprising the sequence of SEQ ID NO: 102, and VL-CDR1, VL-CDR2, and VL-CDR3 of a VL comprising the sequence of SEQ ID NO: 103, wherein the VH-CDR3 comprises any one of following mutations relative to SEQ ID NO: 102: D100N, D100G, D100R, N99G, N99A, or N99M. In some embodiments, the antibody comprises a light chain comprising the sequence of SEQ ID NO: 106, wherein the cytokine or variant thereof is an IL-12 variant comprising the sequence of SEQ ID NO: 36, and wherein the heavy chain comprising the IL-12 variant positioned at the hinge region comprises the sequence of any one of SEQ ID NOs: 268-273.

[0022] In some embodiments according to any one of the immunocytokines described above, (i) the antigen-binding fragment is a ligand, and the target antigen is a receptor specifically recognized by the ligand; or (ii) the antigen-binding fragment is a receptor, and the target antigen is a ligand specifically recognized by the receptor. In some embodiments, the ligand or receptor is selected from the group consisting of IL-2, IL-2Rα (CD25), PD-1, PD-L1, PD-L2, NKG2A, NKG2C, NKG2F, NKG2D, BCMA, APRIL, BAFF, IL-3, IL-13, LLT1, AICL, DNAM-1, and NKp80. In some embodiments, the ligand is PD-L2. In some embodiments, the ligand comprises the sequence of SEQ ID NO: 176. In some embodiments, (i) the cytokine or variant thereof is an IL-2 variant comprising the sequence of SEQ ID NO: 2, and the antigen-binding polypeptide comprising the IL-2 variant positioned at the hinge region comprises the sequence of SEQ ID NO: 180; (ii) the cytokine or variant thereof is an IFN-α variant comprising the sequence of SEQ ID NO: 4, and the antigen-binding polypeptide comprising the IFN-α variant positioned at the hinge region comprises the sequence of SEQ ID NO: 182; (iii) the cytokine or variant thereof is an INF-γ variant comprising the sequence of SEQ ID NO: 19, and the antigen-binding polypeptide comprising the IFN-γ variant positioned at the hinge region comprises the sequence of SEQ ID NO: 183; (iv) the cytokine or variant thereof is an IL-10 variant comprising the sequence of SEQ ID NO: 28, and the antigen-binding polypeptide comprising the IL-10 variant positioned at the hinge region comprises the sequence of SEQ ID NO: 184; (v) the cytokine or variant thereof is an IL-12 variant comprising the sequence of SEQ ID NO: 36, and the antigen-binding polypeptide comprising the IL-12 variant positioned at the hinge region comprises the sequence of SEQ ID NO: 186; (vi) wherein the cytokine or variant thereof is an IL-12 variant comprising the sequence of SEQ ID NO: 275, and wherein the antigen-binding polypeptide comprising the IL-12 variant positioned at the hinge region comprises the sequence of SEQ ID NO: 274; or (vii) the cytokine or variant thereof is an IL-23 variant comprising the sequence of SEQ ID NO: 39, and the antigen-binding polypeptide comprising the IL-23 variant positioned at the hinge region comprises the sequence of SEQ ID NO: 187. In some embodiments, the antigen-binding protein comprises a second antigen-binding polypeptide not comprising the cytokine or variant thereof positioned at the hinge region, and the second antigen-binding polypeptide comprises the sequence of any of SEQ ID NOs: 178, 179, 181, and 185. In some embodiments, the ligand is or derives from extracellular domain of PD-L1. In some embodiments, the PD-L1 ligand has increased (e.g., increased at least about any of 2, 3, 4, 5, 6, 10, 20, 50, 100, 100, or more fold) binding to PD-1 compared to wild-type PD-L1. In some embodiments, the PD-L1 ligand comprises any mutations or combinations thereof, relative to SEQ ID NO: 249: 154Q, E58M, R113T, Mi 15L, S117A, and G119K. In some embodiments, the PD-L1 ligand comprises any of below mutations relative to SEQ ID NO: 249: E58M/R113T/M115L/S117A/G119K, I54Q/E58M/R113T/M115L/S117A/G119K, I54Q/R113T/M115L/S117A/G119K, I54Q/E58M/M115L/S117A/G119K, I54Q/E58M/R113T/S117A/G119K, I54Q/E58M/R113T/M115L/G119K, or I54Q/E58M/R113T/M115L/S117A. In some embodiments, the PD-L1 ligand comprises the sequence of any one of SEQ ID NOs: 255-261. In some embodiments, the cytokine or variant thereof is an IL-12 variant comprising the sequence of SEQ ID NO: 36, and the antigen-binding polypeptide comprising the IL-12 variant positioned at the hinge region comprises the sequence of SEQ ID NO: 277. In some embodiments, the antigen-binding protein comprises a second antigen-binding polypeptide comprising a second cytokine or variant thereof positioned at the hinge region or at the C′ of the Fc fragment. In some embodiments, the second cytokine or variant is any cytokine or variant described herein, such as IL-2 or IFN-γ or variant thereof. In some embodiments, the antigen-binding protein comprises a second antigen-binding polypeptide comprising a second cytokine or variant thereof positioned at the hinge region, and the second antigen-binding polypeptide comprises the sequence of any of SEQ ID NOs: 285-288 and 327. In some embodiments, the ligand is or derives from extracellular domain of PD-L2. In some embodiments, the PD-L2 ligand has increased (e.g., increased at least about any of 2, 3, 4, 5, 6, 10, 20, 50, 100, 100, or more fold) binding to PD-1 compared to wild-type PD-L2. In some embodiments, the PD-L2 ligand comprises any mutations or combinations thereof, relative to SEQ ID NO: 176: T56V, S58V, Q60L, or T56V/S58V/Q60L. In some embodiments, the PD-L2 ligand comprises the sequence of any one of SEQ ID NOs: 262-265. In some embodiments, the cytokine or variant thereof is an IL-12 variant comprising the sequence of SEQ ID NO: 36, and wherein the antigen-binding polypeptide comprising the IL-12 variant positioned at the hinge region comprises the sequence of SEQ ID NO: 293. In some embodiments, the antigen-binding protein comprises a second antigen-binding polypeptide comprising a second cytokine or variant thereof positioned at the hinge region or C′ of Fc fragment. In some embodiments, the second cytokine or variant is any cytokine or variant described herein, such as IL-2 or IFN-γ or variant thereof. In some embodiments, the ligand is or derives from extracellular domain of CD155. In some embodiments, the CD155 ligand comprises the sequence of SEQ ID NO: 267.

[0023] The present application also provides any anti-PD-1 antibodies described herein, such as anti-PD-1 antibody with HC-CDR3 mutations described herein.

[0024] The present application also provides any immunocytokines described herein, such as any constructs described in the Examples, including single chain fusion of cytokine at the hinge region, double chain fusion of cytokein (same or different) at the hinge region, or one cytokine fused at hinge region of one chain and the other fused to C′ of Fc of the other chain. In some embodiments, the cytokine is any of the cytokein or variant described herein, such as IL-2, IL-12, IFN-γ etc.

[0025] Also provided herein are immunocytokines comprising cytokine or variant thereof fused to the C′ of an antigen-binding protein specifically recognizing a target antigen (e.g., at C′ of Fc fragment). In some embodiments, the immunocytokine comprises: a) an antigen-binding protein specifically recognizing a target antigen; and b) a cytokine or variant thereof (e.g., any described herein), wherein the antigen-binding protein comprises an antigen-binding polypeptide comprising from N′ to C′: an antigen-binding fragment (e.g., anti-PD-1, PD-L1, or PD-L2), a hinge region, and an Fc domain subunit or portion thereof, and wherein the cytokine or variant thereof is positioned at the C′ of the Fc domain subunit or portion thereof.

[0026] Also provided herein are immunocytokines comprising a) an antigen-binding protein specifically recognizing a target antigen; b) a first cytokine (e.g., IL-2 or IFN-γ) or variant thereof, and c) a second cytokine (e.g., IL-12) or variant thereof wherein the antigen-binding protein comprises a first antigen-binding polypeptide comprising from N′ to C′: an antigen-binding fragment, a hinge region, and an Fc domain subunit or portion thereof, and wherein the first cytokine or variant thereof is positioned at the hinge region; and a second antigen-binding polypeptide comprising from N′ to C′: an antigen-binding fragment, a hinge region, and an Fc domain subunit or portion thereof, and wherein the second cytokine or variant thereof is positioned at the hinge region.

[0027] Also provided herein are immunocytokines comprising a) an antigen-binding protein specifically recognizing a target antigen; b) a first cytokine (e.g., IL-2 of IFN-γ) or variant thereof, and c) a second cytokine (e.g., IL-12) or variant thereof wherein the antigen-binding protein comprises a first antigen-binding polypeptide comprising from N′ to C′: an antigen-binding fragment, a hinge region, and an Fc domain subunit or portion thereof, and wherein the first cytokine or variant thereof is positioned at the hinge region; and a second antigen-binding polypeptide comprising from N′ to C′: an antigen-binding fragment, a hinge region, and an Fc domain subunit or portion thereof, and wherein the second cytokine or variant thereof is positioned at the C′ of Fc domain.

[0028] Another aspect of the present application provides a method of selectively activating the activity of a cytokine or variant thereof to a cell expressing a target antigen in an individual, comprising administering to the individual an effective amount of an immunocytokine, the immunocytokine comprises: a) an antigen-binding protein (e.g., antibody, or ligand/receptor-Fc fusion protein) specifically recognizing the target antigen; and b) a cytokine or variant thereof, the antigen-binding protein comprises an antigen-binding polypeptide (e.g., heavy chain, or ligand/receptor-Fc fusion polypeptide) comprising from N′ to C′: an antigen-binding fragment (e.g., antibody fragment, ligand, or receptor), a hinge region, and an Fc domain subunit or portion thereof, and the cytokine or variant thereof is positioned at (e.g., at the N-terminus of, at the C-terminus of, or within) the hinge region, and the activity of the cytokine or variant thereof is selectively activated upon binding of the antigen-binding protein to the target antigen. In some embodiments, the present application provides a method of selectively activating the activity of a cytokine or variant thereof to a cell expressing a target antigen in an individual, comprising administering to the individual an effective amount of any one of the immunocytokines described above, and the activity of the cytokine or variant thereof is selectively activated upon binding of the antigen-binding protein to the target antigen. In some embodiments, in the presence of binding of the antigen-binding protein to the target antigen, the activity of the cytokine or variant thereof increases at least about 20% (such as at least about any of 30%, 40%, 50%, 60%, 70%, 80%, 90%, 100%, 200%, 300%, 400%, 500%, or more) compared to that in the absence of binding of the antigen-binding protein to the target antigen. In some embodiments, in the absence of binding of the antigen-binding protein to the target antigen, the activity of the cytokine or variant thereof positioned at the hinge region is no more than about 70% (such as no more than about any of 60%, 50%, 40%, 30%, 20%, 10%, 9%, 8%, 7%, 6%, 5%, 4%, 3%, 2%, 1%, 0.9%, 0.8%, 0.7%, 0.6%, 0.5%, 0.4%, 0.3%, 0.2%, 0.1%, or 0%) of that of a corresponding cytokine or variant thereof in a free state. In some embodiments, the cytokine or variant thereof is a cytokine variant, and the activity of the cytokine variant in a free state is no more than about 80% (such as no more than about any of 70%, 60%, 50%, 40%, 30%, 20%, 10%, or 5%) of that of a corresponding wildtype cytokine in a free state. In some embodiments, the antigen-binding protein is an antibody specifically recognizing the target antigen, the antigen-binding polypeptide comprising the hinge region is a heavy chain of the antibody, and the cytokine or variant thereof is positioned at the hinge region of the heavy chain. In some embodiments, (i) the antigen-binding fragment is a ligand, and the target antigen is a receptor specifically recognized by the ligand; or (ii) the antigen-binding fragment is a receptor, and the target antigen is a ligand specifically recognized by the receptor.

[0029] Further provided are isolated nucleic acids encoding any one of the immunocytokines described herein, vectors (e.g., lentiviral vector) comprising such nucleic acids, host cells (e.g., CHO cell) comprising such nucleic acids or vectors, and methods of producing any one of the immunocytokines described herein.

[0030] Also provided are compositions (e.g., pharmaceutical compositions), kits, and articles of manufacture comprising any of the immunocytokines described herein. Methods of treating a disease or disorder (e.g., cancer, infection, autoimmune disease, allergy, graft rejection, or graft-versus-host disease (GvHD)) in an individual using an effective amount of any of the immunocytokines or compositions (e.g., pharmaceutical compositions) described herein are also provided.

### BRIEF DESCRIPTION OF THE DRAWINGS

[0031] FIG. 1A depicts full-length antibody structure. FIG. 1B depicts an exemplary immunocytokine structure comprising a cytokine or variant thereof fused to the N-terminus of a subunit of the Fc fragment of a parental full-length antibody. FIG. 1C depicts an exemplary immunocytokine structure comprising a cytokine or variant thereof fused to the C-terminus of a heavy chain of a parental full-length antibody. FIG. 1D depicts an exemplary immunocytokine structure comprising a cytokine or variant thereof fused to the N-terminus of a heavy chain variable domain (VH) of a parental full-length antibody. FIG. 1E depicts an exemplary immunocytokine structure comprising a cytokine or variant thereof fused to the C-terminus of a light chain constant region (CL) of a parental full-length antibody. Filled light grey portions indicate parental antibody backbone.

[0032] FIGS. 2A-2D depict exemplary immunocytokine structures of the present invention, in which one or more cytokines or variants thereof (or subunits thereof) are positioned at the hinge region of one or both heavy chains of a parental full-length antibody. FIG. 2A depicts a monomeric cytokine or variant thereof (e.g., IL-2, or IFN-α) positioned at the hinge region of one heavy chain of a parental full-length antibody. FIG. 2B depicts a dimeric (homodimeric or heterodimeric) cytokine or variant thereof (e.g., IFN-γ, IL-10, IL-12, or IL-23) expressed in a single chain and positioned at the hinge region of one heavy chain of a parental full-length antibody. FIG. 2C depicts two cytokines or variants thereof positioned in tandem at the hinge region of one heavy chain of a parental full-length antibody. FIG. 2D depicts two cytokines or variants thereof each positioned at the hinge region of one heavy chain of a parental full-length antibody, or a dimeric (homodimeric or heterodimeric) cytokine or variant thereof with each subunit positioned at the hinge region of one heavy chain of a parental full-length antibody. Filled light grey portions indicate parental antibody backbone.

[0033] FIGS. 3A-3C depict alternative exemplary immunocytokine structures of the present invention, in which a cytokine or variant thereof is positioned between a VH (e.g., within a Fab or an scFv) and a subunit of an Fc fragment. Light grey portions indicate parental antibody backbone.

[0034] FIGS. 4A-4C depict exemplary immunocytokine structures of the present invention, in which one or more cytokines or variants thereof (or subunits thereof) are positioned at the hinge region of one or both polypeptides of a parental ligand/receptor-hinge-Fc fusion protein. FIG. 4A depicts a monomeric cytokine or variant thereof (e.g., IL-2, or IFN-α) positioned at the hinge region of one polypeptide of a parental ligand/receptor-hinge-Fc fusion protein. FIG. 4B depicts two cytokines or variants thereof each positioned at the hinge region of one polypeptide of a parental ligand/receptor-hinge-Fc fusion protein, or a dimeric (homodimeric or heterodimeric) cytokine or variant thereof with each subunit positioned at the hinge region of one polypeptide of a parental ligand/receptor-hinge-Fc fusion protein. FIG. 4C depicts a dimeric (homodimeric or heterodimeric) cytokine or variant thereof (e.g., IFN-γ, IL-10, IL-12, or IL-23) expressed in a single chain, or two cytokines or variants thereof fused in tandem, positioned at the hinge region of one polypeptide of a parental ligand/receptor-hinge-Fc fusion protein. Light grey portions indicate parental ligand/receptor-hinge-Fc fusion protein backbone.

[0035] FIG. 5 depicts tumor volume in 4T1 syngeneic tumor mice treated with IL-12(E59A/F60A)/anti-PD-1 immunocytokine (#48), IL-12(E59A/F60A)/PD-L2-Fc immunocytokine (#29), IL-12(E59A/F60A)/IL-2(R38D/K43E/E61R)/anti-PD-1 immunocytokine (#54), or PBS (negative control). Black arrows indicate injection days.

[0036] FIG. 6 depicts tumor volume in EMT6 syngeneic tumor mice treated with IL-12(E59A/F60A)/anti-PD-1 immunocytokine (#48), IL-12(E59A/F60A)/PD-L2-Fc immunocytokine (#29), IL-2(R38D/K43E/E61R)/PD-L2-Fc immunocytokine (#11), or PBS (negative control). Black arrows indicate injection days.

[0037] FIGS. 7A and 7B depict tumor volume in CT26 syngeneic tumor mice treated with IL-12(F60A)/PD-L2-Fc immunocytokine (#30), PD-L2-Fc/IL-12(F60A) immunocytokine (#34), or PBS (negative control). Black arrows indicate injection days. FIG. 7A shows the average tumor volume for all mice receiving the indicated IL-12 immunocytokine or control. The average tumor size (±STD) of each group when the first treatment was administered is shown in parenthesis. FIG. 7B shows tumor volumes for individual mice receiving the indicated IL-12 immunocytokine.

[0038] FIG. 8 depicts tumor volumes in mice previously treated with IL-12(F60A)/PD-L2-Fc immunocytokine (#30) or PD-L2-Fc/IL-12(F60A) immunocytokine (#34) against CT26 tumor, then re-challenged with CT26 murine colon cancer cells on the right flank and EMT6 murine breast cancer cells on the left flank (as control).

[0039] FIG. 9 depicts tumor volume in late-stage CT26 syngeneic tumor mice treated with IL-12(E59A/F60A)/PD-L2 Fc immunocytokine (#29) or IL-12(F60A)/PD-L2-Fc immunocytokine (#30). Black arrows indicate injection days. The tumor size of each mouse when the first treatment was administered is shown in parenthesis.

[0040] FIG. 10 shows the regression of tumor size in a late-stage CT26 syngeneic tumor mouse model treated with IL-12(F60A)/PD-L2-Fc immunocytokine (construct #30).

[0041] FIGS. 11A and 11B depict tumor volume in EMT6 syngeneic breast tumor mice treated with IL-12(E59A/F60A)/PD-L2 Fc immunocytokine (#29), IL-12(F60A)/PD-L2-Fc immunocytokine (#30), IL-12(E59A/F60A)/anti-PD-1 immunocytokine (#48), or PBS (negative control). Black arrows indicate injection days. FIG. 11A shows the average tumor volume of all mouse groups, with the average tumor size (±STD) when the first treatment was administered shown in parenthesis. FIG. 11B shows tumor volumes for individual mouse receiving the indicated IL-12 immunocytokines.

[0042] FIG. 12 depicts tumor volumes in mice previously treated with IL-12(E59A/F60A)/PD-L2 Fc immunocytokine (#29), IL-12(F60A)/PD-L2-Fc immunocytokine (#30), or IL-12(E59A/F60A)/anti-PD-1 immunocytokine (#48) against EMT6 tumor, then re-challenged with EMT6 murine breast cancer cells on the right flank and CT26 murine colon cancer cells on the left flank (as control).

[0043] FIG. 13 shows 4T1 murine breast cancer tumors extracted from mammary gland fat pad of mice treated with IL-12(E59A/F60A)/PD-L2-Fc immunocytokine (#29), IL-12(F60A)/PD-L2-Fc (#30), a combination of anti-PD-1 and anti-CTLA-4 antibodies, or PBS (negative control).

[0044] FIG. 14 depicts 4T1 murine breast cancer cells metastasized to lungs in mice injected with 4T1 cells at mammary gland fat pad and treated with IL-12(E59A/F60A)/PD-L2-Fc immunocytokine (#29), IL-12(F60A)/PD-L2-Fc (#30), a combination of anti-PD-1 and anti-CTLA-4 antibodies, or PBS (negative control).

[0045] FIGS. 15A and 15B depict tumor volume in B16 melanoma syngeneic tumor mice treated with IL-12(F60A)/PD-L2-Fc immunocytokine (#30), PD-L2-Fc/IL-12(F60A) immunocytokine (#34), or PBS (negative control). Black arrows indicate injection days. FIG. 15A shows the average tumor volume of all mouse groups, with the average tumor size (±STD) when the first treatment was administered shown in parenthesis. FIG. 15B shows tumor volumes for individual mouse receiving the indicated IL-12 immunocytokines.

[0046] FIGS. 16A and 16B depict tumor volume in LL2 lung cancer syngeneic mice treated with IL-12(F60A)/PD-L2-Fc immunocytokine (#30), PD-L2-Fc/IL-12(F60A) immunocytokine (#34), or PBS (negative control). Black arrows indicate injection days. FIG. 16A shows the average tumor volume of all mouse groups, with the average tumor size (±STD) when the first treatment was administered shown in parenthesis. FIG. 16B shows tumor volumes for individual mouse receiving the indicated IL-12 immunocytokines.

### DETAILED DESCRIPTION OF THE INVENTION

[0047] Cytokines are key mediators of innate and adaptive immunity. However, cytokine therapy (e.g., for treating cancer) have shown limited success due to severe toxicity, which limits the dosing far below therapeutically effective dose. Immunocytokines, which are constructs with cytokines fused to antibodies, antigen-binding fragments, ligand-Fc fusion protein, or receptor-Fc fusion protein (hereinafter collectively referred to as “ligand/receptor-Fc fusion protein” or “ligand/receptor-hinge-Fc fusion protein”) can deliver cytokines to target cells (e.g., tumor cells, or immune effector cells) or tissues with the recognition of target antigens by the antibodies or antigen-binding fragments (e.g., antibody fragments, ligands, or receptors) within immunocytokines, which can both reduce non-specific (off-target) cytokine activities and/or associated toxicities (e.g., toxicities on healthy cells or tissues), and concentrate cytokine therapeutic effects at target sites (e.g., disease sites). The activation of immunocytokines can occur via trans-activation, which requires specific binding of the antibody or antigen-binding fragment to target antigens on tumor cells; or cis-activation, which requires specific binding of the antibody or antigen-binding fragment to target antigens on immune cells. Most immunocytokines developed nowadays have the cytokine moiety fused to the N-terminus or the C-terminus of the heavy chain or the light chain of a full-length antibody (such as Hul4.8-IL2, NHS-IL2LT, NHS-IL12, BC1-IL12; see, e.g., FIGS. 1C-1E) or fused to the N-terminus or the C-terminus of an antigen-binding fragment (e.g., diabody, scFv, such as L19-IL2 or F16-IL2), so cytokine-receptor binding/activation can still occur even in the absence of antibody-antigen recognition, leading to off-target toxicities.

[0048] The present invention provides immunocytokines with unique configurations that address the issues faced by current cytokine/immunocytokine therapy. Particularly, immunocytokines of the present invention decrease non-specific activities (i.e., antibody or antigen-binding fragment-independent binding) and increase specific activities (i.e., antibody or antigen-binding fragment-dependent binding) of cytokines by positioning the cytokine moiety (e.g., cytokine or variant thereof) at a hinge region in between an antigen-binding fragment (e.g., ligand, receptor, VHH, scFv, or Fab) and an Fc domain subunit or portion thereof (e.g., CH2-CH3 fragment, or CH2 only, or CH3 only), for example, at a hinge region in between an scFv and an Fc domain subunit (e.g., an antigen-binding polypeptide comprising VH-VL-cytokine-Fc subunit, or VL-VH-cytokine-Fc subunit), at a hinge region in between the Fab and the Fc domain of a full-length antibody (e.g., an antigen-binding polypeptide comprising VH-CH1-cytokine-Fc subunit), or at a hinge region in between a ligand (or a receptor) and an Fc domain subunit (e.g., an antigen-binding polypeptide comprising ligand-cytokine-Fc subunit, or receptor-cytokine-Fc subunit). Without being bound by theory, it is believed that steric hindrance of the antigen-binding fragment (e.g., ligand, receptor, VHH, scFv, Fab) and the Fc domain or portion thereof reduces accessibility of the cytokine or variant thereof to its receptor, or “masks” the cytokine or variant thereof from binding to its receptor, in the absence of target antigen binding by the antigen-binding fragment. Upon binding of the target antigen, on the other hand, the cytokine becomes activated. Surprisingly, unlike other immunocytokine designs which “expose” the cytokine moiety at its N-terminus or C-terminus, the unique immunocytokine configuration of the present invention requires binding of the antigen-binding fragment (e.g., ligand, receptor, VHH, scFv, or Fab) to its target antigen first before binding of the cytokine moiety to its receptor can occur, thus ensuring that cytokine receptor activation is entirely target antigen-binding dependent (on-target). With this enhanced targeting specificity design, cytokines can be safely delivered to target sites (e.g., tumor cells, or immune cells) to achieve therapeutic effects.

[0049] Further, Inventors of the application discovered that certain immunocytokines, such as constructed with a parental antigen-binding protein (e.g., antibody or fragment thereof, or receptor- or ligand-Fc fusion protein) and a cytokine moiety with opposing effects in regulating immune responses, demonstrated significantly better toxicity profile and therapeutic efficacy. For example, when positioning an IL-12 cytokine (pro-inflammatory) at the hinge region of a PD-L2 extracellular domain-hinge-Fc fusion protein, the resulting IL-12/PD-L2-Fc immunocytokine not only specifically targeted IL-12 activity (e.g., activity of binding to IL-12 receptor, and/or IL-12 pro-inflammatory activity) to PD-1+ target cells, but also stimulated PD-1 inhibitory immune checkpoint signaling via PD-L2-PD-1 binding, thus creating an immunosuppression signal that “balances” against the immunostimulating activity of IL-12 (hereinafter also referred to as “balancing immunocytokine”). Any agonist antibodies or ligands (e.g., PD-L2, PD-L1, CD80, or CD86) that can activate or stimulate an immunosuppressive signaling pathway (e.g., by binding to an inhibitory immune checkpoint molecule such as PD-1 or CTLA-4), or any antagonist antibodies, ligands, or receptors that can reduce or block an immunostimulatory signaling pathway (e.g., e.g., by binding to a stimulatory immune checkpoint molecule such as CD27 or CD28 or an immunostimulatory receptor such as IL-2R) can be used in combination with an immunostimulating cytokine or variant thereof (e.g., IL-2, IL-12, or IL-23) to construct a balancing immunocytokine with any of the immunocytokine configurations described herein. Any antagonist antibodies, ligands, or receptors that can reduce or block an immunosuppressive signaling pathway (e.g., by binding to an inhibitory immune checkpoint molecule such as PD-1 or CTLA-4), or any agonist antibodies or ligands (e.g., CD70, CD80, CD86, or IL-2) that can activate or stimulate an immunostimulatory signaling pathway (e.g., e.g., by binding to a stimulatory immune checkpoint molecule such as CD27 or CD28 or an immunostimulatory receptor such as IL-2R) can be used in combination with an immunosuppressive cytokine or variant thereof (e.g., IL-10, IL-27, IL-35, TGF-β) to construct a balancing immunocytokine with any of the immunocytokine configurations described herein. Such “balancing” of immune response design adds an additional regulatory layer to fine-tune the bioactivity and toxicity of immunocytokines described herein, in addition to their unique targeting specificity design.

[0050] The immunocytokines described herein can also treat various advanced and/or hard-to-treat cancer types (e.g., TNBC, melanoma, lung cancer), inhibiting cancer metastasis, treating or delaying tumor progression of cancer types that are resistant to current immunotherapies (e.g., anti-PD-1 therapy, anti-CTLA-4 therapy, or a combination therapy thereof), and/or extending life-span of such patients. The immunocytokines described herein have superior safety profiles with significantly reduced side effects comprared to other immunocytokine formats, such as C′ Fc fusion.

[0051] In combination with this unique immunocytokine structure design, various cytokine variants have also been generated and positioned at the hinge region to screen for cytokine variants with little or no activity (e.g., activity of binding to cytokine receptor, and/or cytokine biological activity) in the absence of target antigen-binding, but increased activity “rescued” or “revealed” in the presence of target antigen-binding. Various immunocytokines have been obtained that can specifically target cytokine (e.g., IFN-α2b, IL-12, IL-23, IL-10, or IFN-γ) activity towards target cells (e.g., PD-1+ cells, CD4+ T cells, or CD8+ T cells), with minimal or no cytokine activity towards non-target cells (e.g., PD-1− cells, CD8+ T cells, or CD4+ T cells).

[0052] Accordingly, one aspect of the present application provides an immunocytokine comprising: a) an antigen-binding protein (e.g., antibody such as full-length antibody, or antigen-binding fragment-hinge-Fc fusion protein such as ligand/receptor-hinge-Fc fusion protein) specifically recognizing a target antigen (e.g., cell surface antigen, receptor, or ligand); and b) a cytokine or variant thereof, wherein the antigen-binding protein comprises an antigen-binding polypeptide (e.g., antibody heavy chain, or antigen-binding fragment-hinge-Fc fusion polypeptide such as ligand/receptor-hinge-Fc fusion polypeptide) comprising from N′ to C′: an antigen-binding fragment (e.g., ligand, receptor, VHH, scFv, or VH), a hinge region, and an Fc domain subunit or portion thereof (e.g., CH2+CH3, or CH2 only), and wherein the cytokine or variant thereof is positioned at (e.g., at the N′ of, at the C′ of, or within) the hinge region.

[0053] In some embodiments, the parental antigen-binding protein (i.e., the antigen-binding protein backbone used for constructing the immunocytokine described herein) is an antibody (e.g., full-length antibody) or fragment thereof specifically recognizing the target antigen. In some embodiments, the antigen-binding polypeptide comprising the hinge region is a heavy chain of the antibody, and wherein the cytokine or variant thereof is positioned at the hinge region of the heavy chain. Thus, in some embodiments, the present invention provides an immunocytokine comprising: a) an antibody (e.g., a full-length antibody) specifically recognizing a target antigen; and b) a cytokine or variant thereof, wherein the antibody comprises a heavy chain comprising a hinge region, and wherein the cytokine or variant thereof is positioned at (e.g., at the N′ of, at the C′ of, or within) the hinge region. The immunocytokine described herein in some embodiments comprises: (a) a first antigen-binding polypeptide comprising from N-terminus to C-terminus: a first VH domain, an optional first CH1, a cytokine moiety at a hinge region, and a first subunit of an Fc domain or portion thereof (e.g., CH2+CH3, or CH2 only); (b) a second antigen-binding polypeptide comprising from N-terminus to C-terminus: a second VH domain, an optional second CH1, a hinge region, and a second subunit of the Fc domain or portion thereof (e.g., CH2+CH3, or CH2 only); (c) a third antigen-binding polypeptide comprising from N-terminus to C-terminus: a first VL domain and an optional first CL; and (d) a fourth antigen-binding polypeptide comprising from N-terminus to C-terminus: a second VL domain and an optional second CL; wherein the first VH and the first VL and optionally the first CH1 and first CL form a first antigen-binding domain (e.g., Fab) specifically recognizing a first target antigen; and wherein the second VH and the second VL and optionally the second CH1 and second CL form a second antigen-binding domain (e.g., Fab) specifically recognizing a second target antigen. In some embodiments, the antigen-binding polypeptide comprising the hinge region is an scFv-hinge-Fc fusion polypeptide. The immunocytokine described herein in some embodiments comprises: (a) a first antigen-binding polypeptide comprising from N-terminus to C-terminus: (a first VH domain and a first VL domain) or (a first VL domain and a first VH domain), a cytokine moiety at a hinge region, and a first subunit of an Fc domain or portion thereof (e.g., CH2+CH3, or CH2 only); and (b) a second antigen-binding polypeptide comprising from N-terminus to C-terminus: (a second VH domain and a second VL domain) or (a second VL domain and a second VH domain), a hinge region, and a second subunit of the Fc domain or portion thereof (e.g., CH2+CH3, or CH2 only); wherein the first VH and the first VL form a first antigen-binding domain (e.g., scFv) specifically recognizing a first target antigen; and wherein the second VH and the second VL and form a second antigen-binding domain (e.g., scFv) specifically recognizing a second target antigen. In some embodiments, the antigen-binding polypeptide comprising the hinge region is a VHH-hinge-Fc fusion polypeptide. The immunocytokine described herein in some embodiments comprises: (a) a first antigen-binding polypeptide comprising from N-terminus to C-terminus: a first VHH, a cytokine moiety at a hinge region, and a first subunit of an Fc domain or portion thereof (e.g., CH2+CH3, or CH2 only); and (b) a second antigen-binding polypeptide comprising from N-terminus to C-terminus: a second VHH, a hinge region, and a second subunit of the Fc domain or portion thereof (e.g., CH2+CH3, or CH2 only); wherein the first VHH specifically recognizes a first target antigen; and wherein the second VHH specifically recognizes a second target antigen.

[0054] In some embodiments, the parental antigen-binding protein is an antigen-binding fragment-hinge-Fc fusion protein. In some embodiments, the antigen-binding fragment is an scFv. In some embodiments, the antigen-binding fragment is a VHH. In some embodiments, the antigen-binding fragment is a ligand, and the target antigen is a receptor specifically recognized by the ligand. In some embodiments, the antigen-binding fragment is a receptor, and the target antigen is a ligand specifically recognized by the receptor. Thus, in some embodiments, the present invention provides an immunocytokine comprising: a) an antigen-binding fragment-hinge-Fc fusion protein specifically recognizing a target antigen (e.g., cell surface antigen, receptor, or ligand); and b) a cytokine or variant thereof, wherein the antigen-binding fragment-hinge-Fc fusion protein comprises an antigen-binding fragment-hinge-Fc fusion polypeptide comprising from N′ to C′: an antigen-binding fragment (e.g., ligand, receptor, VHH, or scFv), a hinge region, and an Fc domain subunit or portion thereof, and wherein the cytokine or variant thereof is positioned at (e.g., at the N′ of, at the C′ of, or within) the hinge region. The immunocytokine described herein in some embodiments comprises: (a) a first antigen-binding polypeptide comprising from N-terminus to C-terminus: a first antigen-binding fragment (e.g., ligand, receptor, VHH, or scFv), a cytokine moiety at a hinge region, and a first subunit of an Fc domain or portion thereof (e.g., CH2+CH3, or CH2 only); and (b) a second antigen-binding polypeptide comprising from N-terminus to C-terminus: a second antigen-binding fragment (e.g., ligand, receptor, VHH, or scFv), a hinge region, and a second subunit of the Fc domain or portion thereof (e.g., CH2+CH3, or CH2 only); wherein the first antigen-binding fragment specifically recognizes a first target antigen (e.g., cell surface antigen, receptor, or ligand); and wherein the second antigen-binding fragment specifically recognizes a second target antigen (e.g., cell surface antigen, receptor, or ligand).

[0055] Also provided are isolated nucleic acids encoding such immunocytokines, vectors comprising such nucleic acids, host cells comprising such nucleic acids or vectors, methods of producing such immunocytokines, pharmaceutical compositions and articles of manufacture comprising such immunocytokines, methods of selectively activating the activity of a cytokine or variant thereof to a cell expressing a target antigen with such immunocytokines or pharmaceutical compositions thereof, and methods of treating diseases (e.g., cancer, viral infection, autoimmune diseases) with such immunocytokines or pharmaceutical compositions thereof.

### I. Definitions

[0056] The practice of the present invention will employ, unless indicated specifically to the contrary, conventional methods of virology, immunology, microbiology, molecular biology and recombinant DNA techniques within the skill of the art, many of which are described below for the purpose of illustration. Such techniques are explained fully in the literature. See, e.g., Current Protocols in Molecular Biology or Current Protocols in Immunology, John Wiley & Sons, New York, N.Y. (2009); Ausubel et al., Short Protocols in Molecular Biology, 3rd ed., John Wiley & Sons, 1995; Sambrook and Russell, Molecular Cloning: A Laboratory Manual (3rd Edition, 2001); Maniatis et al., Molecular Cloning: A Laboratory Manual (1982); DNA Cloning: A Practical Approach, vol. I&II (D. Glover, ed.); Oligonucleotide Synthesis (N. Gait, ed., 1984); Nucleic Acid Hybridization (B. Hames & S. Higgins, eds., 1985); Transcription and Translation (B. Hames & S. Higgins, eds., 1984); Animal Cell Culture (R. Freshney, ed., 1986); Perbal, A Practical Guide to Molecular Cloning (1984) and other like references.

[0057] The term “immunocytokine”, as used herein refers to an antigen-binding protein (e.g., antibody, or antigen-binding fragment (e.g., ligand, receptor, or antibody fragment)) format, which is fused to a cytokine molecule. The antigen-binding protein (e.g., antibody, or antigen-binding fragment (e.g., ligand, receptor, or antibody fragment)) format may be any of those described herein, and the cytokine may be fused directly, or by means of a linker or chemical conjugation to the antigen-binding protein format.

[0058] The term “cytokine storm,” also known as a “cytokine cascade” or “hypercytokinemia,” is a potentially fatal immune reaction typically consisting of a positive feedback loop between cytokines and immune cells, with highly elevated levels of various cytokines (e.g., INF-γ, IL-10, IL-6, CCL2, etc.).

[0059] As used herein, when an antigen-binding protein (e.g., antibody, antigen-binding fragment, or ligand) is referred to as an “antagonist” of a target antigen (e.g., a receptor, or an immune checkpoint molecule), it means that upon target antigen binding, the antigen-binding protein (e.g., antibody, antigen-binding fragment, or ligand) blocks, suppresses, or reduces the biological activity of the target antigen (e.g., blocks receptor signaling). For example, an anti-PD-1 antagonist antibody is an antibody that reduces or blocks PD-1 signaling. When an antigen-binding protein (e.g., antibody, antigen-binding fragment, or ligand) is referred to as an “agonist” of a target antigen (e.g., a receptor, or an immune checkpoint molecule), it means that upon target antigen binding, the antigen-binding protein (e.g., antibody, antigen-binding fragment, or ligand) stimulates, activates, or enhances the biological activity of the target antigen (e.g., activates receptor signaling). For example, a wildtype PD-L2 ligand (e.g., extracellular domain) is an agonist that activates PD-1 signaling.

[0060] As used herein, “treatment” or “treating” is an approach for obtaining beneficial or desired results including clinical results. For purposes of this invention, beneficial or desired clinical results include, but are not limited to, one or more of the following: alleviating one or more symptoms resulting from the disease, diminishing the extent of the disease, stabilizing the disease (e.g., preventing or delaying the worsening of the disease), preventing or delaying the spread (e.g., metastasis) of the disease, preventing or delaying the recurrence of the disease, delay or slowing the progression of the disease, ameliorating the disease state, providing a remission (partial or total) of the disease, decreasing the dose of one or more other medications required to treat the disease, delaying the progression of the disease, increasing the quality of life, and/or prolonging survival. Also encompassed by “treatment” is a reduction of pathological consequence of the disease. The methods of the invention contemplate any one or more of these aspects of treatment. For example, an individual is successfully “treated” if one or more symptoms associated with viral infection are mitigated or eliminated, including, but are not limited to, reducing the proliferation of (or destroying) infectious virus, decreasing symptoms resulting from the disease (e.g., cytokine storm), increasing the quality of life of those suffering from the disease, decreasing the dose of other medications required to treat the disease, and/or prolonging survival of individuals.

[0061] The term “prevent,” and similar words such as “prevented,” “preventing” etc., indicate an approach for preventing, inhibiting, or reducing the likelihood of the recurrence of, a disease or condition, e.g., cancer. It also refers to delaying the recurrence of a disease or condition or delaying the recurrence of the symptoms of a disease or condition. As used herein, “prevention” and similar words also includes reducing the intensity, effect, symptoms and/or burden of a disease or condition prior to recurrence of the disease or condition.

[0062] As used herein, “delaying” the development of a disease means to defer, hinder, slow, retard, stabilize, and/or postpone development of the disease. This delay can be of varying lengths of time, depending on the history of the disease and/or individual being treated. A method that “delays” development of a disease is a method that reduces probability of disease development in a given time frame and/or reduces the extent of the disease in a given time frame, when compared to not using the method. Such comparisons are typically based on clinical studies, using a statistically significant number of individuals. Cancer development can be detectable using standard methods, including, but not limited to, computerized axial tomography (CAT Scan), Magnetic Resonance Imaging (MRI), abdominal ultrasound, clotting tests, arteriography, or biopsy. Development may also refer to disease (e.g., cancer) progression that may be initially undetectable and includes occurrence, recurrence, and onset.

[0063] The term “effective amount” used herein refers to an amount of an agent or a combination of agents, sufficient to treat a specified disorder, condition or disease such as ameliorate, palliate, lessen, and/or delay one or more of its symptoms. In reference to cancer, an effective amount comprises an amount sufficient to cause a tumor to shrink and/or to decrease the growth rate of the tumor (such as to suppress tumor growth) or to prevent or delay other unwanted cell proliferation. In some embodiments, an effective amount is an amount sufficient to delay development. In some embodiments, an effective amount is an amount sufficient to prevent or delay recurrence. An effective amount can be administered in one or more administrations. The effective amount of the drug or composition may: (i) reduce the number of cancer cells; (ii) reduce tumor size; (iii) inhibit, retard, slow to some extent and preferably stop cancer cell infiltration into peripheral organs; (iv) inhibit (i.e., slow to some extent and preferably stop) tumor metastasis; (v) inhibit tumor growth; (vi) prevent or delay occurrence and/or recurrence of tumor; (vii) relieve to some extent one or more of the symptoms associated with the cancer; (viii) stimulate or activate immune cells (e.g., immune effector cells), e.g. for immune response, such as to produce cytokine(s), or for immune cell proliferation and/or differentiation; and/or (ix) prevent, reduce, or eliminate inflammation or autoimmune response, such as inhibiting pro-inflammatory cytokine secretion. In the case of viral infection, the effective amount of the agent may inhibit (i.e., reduce to some extent and preferably abolish) virus activity; control and/or attenuate and/or inhibit inflammation or a cytokine storm induced by said viral pathogen; prevent worsening, arrest and/or ameliorate at least one symptom of said viral infection or damage to said subject or an organ or tissue of said subject, emanating from or associated with said viral infection; control, reduce, and/or inhibit cell necrosis in infected and/or non-infected tissue and/or organ; control, ameliorate, and/or prevent the infiltration of inflammatory cells (e.g., NK cells, cytotoxic T cells, neutrophils) in infected or non-infected tissues and/or organs; and/or stimulate or activate immune cells (e.g., immune effector cells), e.g., for immune response, such as to produce cytokine(s), or for immune cell proliferation and/or differentiation.

[0064] As used herein, an “individual” or a “subject” refers to a mammal, including, but not limited to, human, bovine, horse, feline, canine, rodent, or primate. In some embodiments, the individual is a human.

[0065] The term “antibody” is used in its broadest sense and encompasses various antibody structures, including but not limited to monoclonal antibodies, polyclonal antibodies, multispecific antibodies (e.g., bispecific antibodies), full-length antibodies and antigen-binding fragments thereof, so long as they exhibit the desired antigen-binding activity. The term “antibody” includes conventional 4-chain antibodies, single-domain antibodies, and antigen-binding fragments thereof.

[0066] The basic 4-chain antibody unit is a heterotetrameric glycoprotein composed of two identical light (L) chains and two identical heavy (H) chains. An IgM antibody consists of 5 of the basic heterotetramer units along with an additional polypeptide called a J chain, and contains 10 antigen-binding sites, while IgA antibodies comprise from 2-5 of the basic 4-chain units which can polymerize to form polyvalent assemblages in combination with the J chain. In the case of IgGs, the 4-chain unit is generally about 150,000 Daltons. Each L chain is linked to an H chain by one covalent disulfide bond, while the two H chains are linked to each other by one or more disulfide bonds depending on the H chain isotype. Each H and L chain also has regularly spaced intrachain disulfide bridges. Each H chain has at the N-terminus, a variable domain (VH) followed by three constant domains (CH) for each of the α and γ chains and four CH domains for p and E isotypes. Each L chain has at the N-terminus, a variable domain (VL) followed by a constant domain at its other end. The VL is aligned with the VH and the CL is aligned with the first constant domain of the heavy chain (CH1). Particular amino acid residues are believed to form an interface between the light chain and heavy chain variable domains. The pairing of a VH and VL together forms a single antigen-binding site. For the structure and properties of the different classes of antibodies, see e.g., Basic and ClinicalImmunology, 8th Edition, Daniel P. Sties, Abba I. Terr and Tristram G. Parsolw (eds), Appleton & Lange, Norwalk, Conn., 1994, page 71 and Chapter 6. The L chain from any vertebrate species can be assigned to one of two clearly distinct types, called kappa and lambda, based on the amino acid sequences of their constant domains. Depending on the amino acid sequence of the constant domain of their heavy chains (CH), immunoglobulins can be assigned to different classes or isotypes. There are five classes of immunoglobulins: IgA, IgD, IgE, IgG and IgM, having heavy chains designated α, δ, ε, γ and μ, respectively. The γ and α classes are further divided into subclasses on the basis of relatively minor differences in the C_{H} sequence and function, e.g., humans express the following subclasses: IgG1, IgG2A, IgG2B, IgG3, IgG4, IgA1 and IgA2.

[0067] An “isolated” antibody (or construct) is one that has been identified, separated and/or recovered from a component of its production environment (e.g., natural or recombinant). Preferably, the isolated polypeptide is free of association with all other components from its production environment. Contaminant components of its production environment, such as that resulting from recombinant transfected cells, are materials that would typically interfere with research, diagnostic or therapeutic uses for the antibody, and may include enzymes, hormones, and other proteinaceous or non-proteinaceous solutes. In preferred embodiments, the polypeptide will be purified: (1) to greater than 95% by weight of antibody as determined by, for example, the Lowry method, and in some embodiments, to greater than 99% by weight; (2) to a degree sufficient to obtain at least 15 residues of N-terminal or internal amino acid sequence by use of a spinning cup sequenator; or (3) to homogeneity by SDS-PAGE under non-reducing or reducing conditions using Coomassie Blue or, preferably, silver stain. Isolated antibody (or construct) includes the antibody in situ within recombinant cells since at least one component of the antibody's natural environment will not be present. Ordinarily, however, an isolated polypeptide, antibody, or construct will be prepared by at least one purification step.

[0068] The “variable region” or “variable domain” of an antibody refers to the amino-terminal domains of the heavy or light chain of the antibody. The variable domains of the heavy chain and light chain may be referred to as “V_{H}” and “V_{L}”, respectively. These domains are generally the most variable parts of the antibody (relative to other antibodies of the same class) and contain the antigen binding sites. Heavy-chain only antibodies from the Camelid species have a single heavy chain variable region, which is referred to as “VHH”. VHH is thus a special type of V_{H}. The term “variable” refers to the fact that certain segments of the variable domains differ extensively in sequence among antibodies. The V domain mediates antigen binding and defines the specificity of a particular antibody for its particular antigen. However, the variability is not evenly distributed across the entire span of the variable domains. Instead, it is concentrated in three segments called complementary determining regions (CDRs) or hypervariable regions (HVRs) both in the heavy chain and light chain variable domains. The more highly conserved portions of variable domains are called the framework regions (FR). The variable domains of native heavy and light chains each comprise four FR regions, largely adopting a beta-sheet configuration, connected by three CDRs, which form loops connecting, and in some cases forming part of, the beta-sheet structure. The CDRs in each chain are held together in close proximity by the FR regions and, with the CDRs from the other chain, contribute to the formation of the antigen-binding site of antibodies (see Kabat et al., Sequences of Immunological Interest, Fifth Edition, National Institute of Health, Bethesda, Md. (1991)). The constant domains are not involved directly in the binding of antibody to an antigen, but exhibit various effector functions, such as participation of the antibody in antibody-dependent cellular toxicity.

[0069] The term “monoclonal antibody” as used herein refers to an antibody obtained from a population of substantially homogeneous antibodies, i.e., the individual antibodies comprising the population are identical except for possible naturally occurring mutations and/or post-translation modifications (e.g., isomerizations, amidations) that may be present in minor amounts.

[0070] Monoclonal antibodies are highly specific, being directed against a single antigenic site. In contrast to polyclonal antibody preparations, which typically include different antibodies directed against different determinants (epitopes), each monoclonal antibody is directed against a single determinant on the antigen. In addition to their specificity, the monoclonal antibodies are advantageous in that they are synthesized by the hybridoma culture, uncontaminated by other immunoglobulins. The modifier “monoclonal” indicates the character of the antibody as being obtained from a substantially homogeneous population of antibodies and is not to be construed as requiring production of the antibody by any particular method. For example, the monoclonal antibodies to be used in accordance with the present invention may be made by a variety of techniques, including, for example, the hybridoma method (e.g., Kohler and Milstein., Nature, 256:495-97 (1975); Hongo et al., Hybridoma, 14 (3): 253-260 (1995), Harlow et al., Antibodies: A Laboratory Manual, (Cold Spring Harbor Laboratory Press, 2^{nd} ed. 1988); Hammerling et al., in: MonoclonalAntibodies and T-Cell Hybridomas 563-681 (Elsevier, N.Y., 1981)), recombinant DNA methods (see, e.g., U.S. Pat. No. 4,816,567), phage-display technologies (see, e.g., Clackson et al., Nature, 352: 624-628 (1991); Marks et al., J. Mol. Biol. 222: 581-597 (1992); Sidhu et al., J. Mol. Biol. 338(2): 299-310 (2004); Lee et al., J. Mol. Biol. 340(5): 1073-1093 (2004); Fellouse, Proc. Natl. Acad. Sci. USA 101(34): 12467-12472 (2004); and Lee et al., J. Immunol. Methods 284(1-2): 119-132 (2004), and technologies for producing human or human-like antibodies in animals that have parts or all of the human immunoglobulin loci or genes encoding human immunoglobulin sequences (see, e.g., WO 1998/24893; WO 1996/34096; WO 1996/33735; WO 1991/10741; Jakobovits et al., Proc. Natl. Acad. Sci. USA 90: 2551 (1993); Jakobovits et al., Nature 362: 255-258 (1993); Bruggemann et al., Year in Immunol. 7:33 (1993); U.S. Pat. Nos. 5,545,807; 5,545,806; 5,569,825; 5,625,126; 5,633,425; and U.S. Pat. No. 5,661,016; Marks et al., Bio/Technology 10: 779-783 (1992); Lonberg et al., Nature 368: 856-859 (1994); Morrison, Nature 368: 812-813 (1994); Fishwild et al., Nature Biotechnol. 14: 845-851 (1996); Neuberger, Nature Biotechnol. 14: 826 (1996); and Lonberg and Huszar, Intern. Rev. Immunol. 13: 65-93 (1995).

[0071] The terms “full-length antibody”, “intact antibody”, or “whole antibody” are used interchangeably to refer to an antibody in its substantially intact form, as opposed to an antibody fragment. Specifically, full-length 4-chain antibodies include those with heavy and light chains including an Fc region. Full-length heavy-chain only antibodies include the heavy chain variable domain (such as VHH) and an Fc region. The constant domains may be native sequence constant domains (e.g., human native sequence constant domains) or amino acid sequence variants thereof. In some cases, the intact antibody may have one or more effector functions. It is to be understood that for the present invention, reference to a “full-length antibody” also includes a full-length antibody backbone or parental full-length antibody (e.g., full-length 4-chain antibody, or full-length heavy-chain only antibody) whose hinge region has a cytokine moiety positioned therein (see, e.g., FIGS. 2A-2D).

[0072] An “antibody fragment”, “antigen-binding domain”, or “antigen-binding fragment” comprises a portion of an intact antibody, preferably the antigen binding and/or the variable region of the intact antibody. Examples of antibody fragments include, but are not limited to Fab, Fab′, F(ab′)₂ and Fv fragments; diabodies; linear antibodies (see U.S. Pat. No. 5,641,870, Example 2; Zapata et al., Protein Eng. 8(10): 1057-1062 (1995)); single-chain antibody (scFv) molecules; single-domain antibodies (such as VHH), and multispecific antibodies formed from antibody fragments. Papain digestion of antibodies produced two identical antigen-binding fragments, called “Fab” fragments, and a residual “Fc” fragment, a designation reflecting the ability to crystallize readily. The Fab fragment consists of an entire L chain along with the variable domain of the H chain (V_{H}), and the first constant domain of one heavy chain (C_{H}1). Each Fab fragment is monovalent with respect to antigen binding, i.e., it has a single antigen-binding site. Pepsin treatment of an antibody yields a single large F(ab′)₂ fragment which roughly corresponds to two disulfide linked Fab fragments having different antigen-binding activity and is still capable of cross-linking antigen. Fab′ fragments differ from Fab fragments by having a few additional residues at the carboxy-terminus of the CH1 domain including one or more cysteines from the antibody hinge region. Fab′-SH is the designation herein for Fab′ in which the cysteine residue(s) of the constant domains bear a free thiol group. F(ab′)₂ antibody fragments originally were produced as pairs of Fab′ fragments which have hinge cysteines between them. Other chemical couplings of antibody fragments are also known. It is to be understood that for the present invention, reference to an “antigen-binding domain” or “antigen-binding fragment” also includes a ligand that can specifically recognizes a target receptor, or a receptor that can specifically recognizes a target ligand.

[0073] The term “constant domain” refers to the portion of an immunoglobulin molecule having a more conserved amino acid sequence relative to the other portion of the immunoglobulin, the variable domain, which contains the antigen-binding site. The constant domain contains the C_{H}1, C_{H}2 and C_{H}3 domains (collectively, C_{H}) of the heavy chain and the CHL (or CL) domain of the light chain.

[0074] The “heavy chain” of antibodies (immunoglobulins) can be divided into three functional regions: the Fd region, the hinge region, and the Fc region (fragment crystallizable). The Fd region comprises the VH and CH1 domains and, in combination with the light chain, forms Fab—the antigen-binding fragment. The Fc fragment is responsible for the immunoglobulin effector functions, which include, for example, complement fixation and binding to cognate Fc receptors of effector cells. The hinge region, found in IgG, IgA, and IgD immunoglobulin classes, acts as a flexible spacer that allows the Fab portion to move freely in space relative to the Fc region. In contrast to the constant regions, the hinge domains are structurally diverse, varying in both sequence and length among immunoglobulin classes and subclasses. For heavy-chain only antibody, “heavy chain” includes the heavy chain variable domain (such as VHH), a hinge region, and an Fc region. It is to be understood that for the present invention, reference to a “heavy chain” also includes a heavy chain comprising a VH domain, a hinge region, and an Fc domain or portion thereof (e.g., VL-VH-hinge-Fc domain subunit, or VH-VL-hinge-Fc domain subunit), and a heavy chain (e.g., heavy chain of a full-length 4-chain antibody, an VH-hinge-Fc-containing antibody, or heavy chain of a heavy-chain only antibody) comprising a cytokine moiety positioned at the hinge region (see, e.g., FIGS. 2A-3C).

[0075] The “light chains” of antibodies (immunoglobulins) from any mammalian species can be assigned to one of two clearly distinct types, called kappa (“x”) and lambda (“X”), based on the amino acid sequences of their constant domains.

[0076] “Fv” is the minimum antibody fragment which contains a complete antigen-recognition and -binding site. This fragment consists of a dimer of one heavy- and one light-chain variable region domain in tight, non-covalent association. From the folding of these two domains emanate six hypervariable loops (3 loops each from the H and L chain) that contribute the amino acid residues for antigen binding and confer antigen binding specificity to the antibody. However, even a single variable domain (or half of an Fv comprising only three CDRs specific for an antigen) has the ability to recognize and bind antigen, although at a lower affinity than the entire binding site. “Single-chain Fv” also abbreviated as “sFv” or “scFv” are antibody fragments that comprise the V_{H} and V_{L} antibody domains connected into a single polypeptide chain. Preferably, the scFv polypeptide further comprises a polypeptide linker between the V_{H} and V_{L} domains which enables the scFv to form the desired structure for antigen binding. For a review of the scFv, see Pluckthun in The Pharmacology of Monoclonal Antibodies, vol. 113, Rosenburg and Moore eds., Springer-Verlag, New York, pp. 269-315 (1994).

[0077] The term “diabodies” refers to small antibody fragments prepared by constructing sFv fragments (see preceding paragraph) with short linkers (about 5-10 residues) between the V_{H} and V_{L} domains such that inter-chain but not intra-chain pairing of the V domains is achieved, thereby resulting in a bivalent fragment, i.e., a fragment having two antigen-binding sites. Bispecific diabodies are heterodimers of two “crossover” sFv fragments in which the V_{H} and V_{L} domains of the two antibodies are present on different polypeptide chains. Diabodies are described in greater detail in, for example, EP 404,097; WO 93/11161; Hollinger et al., Proc. Natd. Acad. Sci. USA 90: 6444-6448 (1993).

[0078] The monoclonal antibodies herein specifically include “chimeric” antibodies (immunoglobulins) in which a portion of the heavy and/or light chain is identical with or homologous to corresponding sequences in antibodies derived from a particular species or belonging to a particular antibody class or subclass, while the remainder of the chain(s) is(are) identical with or homologous to corresponding sequences in antibodies derived from another species or belonging to another antibody class or subclass, as well as fragments of such antibodies, so long as they exhibit the desired biological activity (U.S. Pat. No. 4,816,567; Morrison et al., Proc. Natl. Acad. Sci. USA, 81:6851-6855 (1984)). “Humanized antibody” is used as a subset of “chimeric antibodies”.

[0079] “Humanized” forms of non-human (e.g., llama or camelid) antibodies are chimeric antibodies that contain minimal sequence derived from non-human immunoglobulin. In some embodiments, a humanized antibody is a human immunoglobulin (recipient antibody) in which residues from an CDR (hereinafter defined) of the recipient are replaced by residues from an CDR of a non-human species (donor antibody) such as mouse, rat, rabbit, camel, llama, alpaca, or non-human primate having the desired specificity, affinity, and/or capacity. In some instances, framework (“FR”) residues of the human immunoglobulin are replaced by corresponding non-human residues. Furthermore, humanized antibodies may comprise residues that are not found in the recipient antibody or in the donor antibody. These modifications may be made to further refine antibody performance, such as binding affinity. In general, a humanized antibody will comprise substantially all of at least one, and typically two, variable domains, in which all or substantially all of the hypervariable loops correspond to those of a non-human immunoglobulin sequence, and all or substantially all of the FR regions are those of a human immunoglobulin sequence, although the FR regions may include one or more individual FR residue substitutions that improve antibody performance, such as binding affinity, isomerization, immunogenicity, etc. The number of these amino acid substitutions in the FR is typically no more than 6 in the H chain, and in the L chain, no more than 3. The humanized antibody optionally will also comprise at least a portion of an immunoglobulin constant region (Fc), typically that of a human immunoglobulin. For further details, see, e.g., Jones et al., Nature 321:522-525 (1986); Riechmann et al., Nature 332:323-329 (1988); and Presta, Curr. Op. Struct. Biol. 2:593-596 (1992). See also, for example, Vaswani and Hamilton, Ann. Allergy, Asthma & Immunol. 1:105-115 (1998); Harris, Biochem. Soc. Transactions 23:1035-1038 (1995); Hurle and Gross, Curr. Op. Biotech. 5:428-433 (1994); and U.S. Pat. Nos. 6,982,321 and 7,087,409.

[0080] A “human antibody” is an antibody that possesses an amino-acid sequence corresponding to that of an antibody produced by a human and/or has been made using any of the techniques for making human antibodies as disclosed herein. This definition of a human antibody specifically excludes a humanized antibody comprising non-human antigen-binding residues. Human antibodies can be produced using various techniques known in the art, including phage-display libraries. Hoogenboom and Winter, J. Mol. Biol., 227:381 (1991); Marks et al., J. Mol. Biol., 222:581 (1991). Also available for the preparation of human monoclonal antibodies are methods described in Cole et al., Monoclonal Antibodies and Cancer Therapy, Alan R. Liss, p. 77 (1985); Boerner et al., J. Immunol., 147(1):86-95 (1991). See also van Dijk and van de Winkel, Curr. Opin. Pharmacol. 5: 368-74 (2001). Human antibodies can be prepared by administering the antigen to a transgenic animal that has been modified to produce such antibodies in response to antigenic challenge, but whose endogenous loci have been disabled, e.g., immunized xenomice (see, e.g., U.S. Pat. Nos. 6,075,181 and 6,150,584 regarding XENOMOUSE™ technology). See also, for example, Li et al., Proc. Natl. Acad. Sci. USA, 103:3557-3562 (2006) regarding human antibodies generated via a human B-cell hybridoma technology.

[0081] The term “hypervariable region,” “HVR,” or “HV,” when used herein refers to the regions of an antibody variable domain which are hypervariable in sequence and/or form structurally defined loops. Generally, single-domain antibodies comprise three HVRs (or CDRs): HVR1 (or CDR1), HVR2 (or CDR2), and HVR3 (or CDR3). HVR3 (or CDR3) displays the most diversity of the three HVRs and is believed to play a unique role in conferring fine specificity to antibodies. See, e.g., Hamers-Casterman et al., Nature 363:446-448 (1993); Sheriff et al., Nature Struct. Biol. 3:733-736 (1996).

[0082] The term “Complementarity Determining Region” or “CDR” are used to refer to hypervariable regions as defined by the Kabat system. See Kabat et al., Sequences of Proteins of Immunological Interest, 5th Ed. Public Health Service, National Institutes of Health, Bethesda, Md. (1991).

[0083] A number of HVR delineations are in use and are encompassed herein. The Kabat Complementarity Determining Regions (CDRs) are based on sequence variabilitγ and α re the most commonly used (Kabat et al., Sequences of Proteins of Immunological Interest, 5th Ed. Public Health Service, National Institutes of Health, Bethesda, Md. (1991)). Chothia refers instead to the location of the structural loops (Chothia and Lesk, J. Mol. Biol. 196:901-917 (1987)). The AbM HVRs represent a compromise between the Kabat HVRs and Chothia structural loops, and are used by Oxford Molecular's AbM antibody modeling software. The “contact” HVRs are based on an analysis of the available complex crystal structures. The residues from each of these HVRs are noted below in Table A.

TABLE A
HVR delineations

| Loop | Kabat | AbM | Chothia | Contact |
|---|---|---|---|---|
| L1 | L24-L34 | L24-L34 | L26-L32 | L30-L36 |
| L2 | L50-L56 | L50-L56 | L50-L52 | L46-L55 |
| L3 | L89-L97 | L89-L97 | L91-L96 | L89-L96 |
| H1 | H31-H35B | H26-H35B | H26-H32 | H30-H35B |

(Kabat Numbering)

| | | | | |
|---|---|---|---|---|
| H1 | H31-H35 | H26-H35 | H26-H32 | H30-H35 |

(Chothia Numbering)

| | | | | |
|---|---|---|---|---|
| H2 | H50-H65 | H50-H58 | H53-H55 | H47-H58 |
| H3 | H95-H102 | H95-H102 | H96-H101 | H93-H101 |

[0084] HVRs may comprise “extended HVRs” as follows: 24-36 or 24-34 (L1), 46-56 or 50-56 (L2) and 89-97 or 89-96 (L3) in the V_{L} and 26-35 (H1), 50-65 or 49-65 (H2) and 93-102, 94-102, or 95-102 (H3) in the V_{H}. The variable domain residues are numbered according to Kabat et al., supra, for each of these definitions.

[0085] The expression “variable-domain residue-numbering as in Kabat” or “amino-acid-position numbering as in Kabat,” and variations thereof, refers to the numbering system used for heavy-chain variable domains or light-chain variable domains of the compilation of antibodies in Kabat et al., supra. Using this numbering system, the actual linear amino acid sequence may contain fewer or additional amino acids corresponding to a shortening of, or insertion into, a FR or HVR of the variable domain. For example, a heavy-chain variable domain may include a single amino acid insert (residue 52a according to Kabat) after residue 52 of H2 and inserted residues (e.g. residues 82a, 82b, and 82c, etc. according to Kabat) after heavy-chain FR residue 82. The Kabat numbering of residues may be determined for a given antibody by alignment at regions of homology of the sequence of the antibody with a “standard” Kabat numbered sequence.

[0086] Unless indicated otherwise herein, the numbering of the residues in an immunoglobulin heavy chain is that of the EU index as in Kabat et al., supra. The “EU index as in Kabat” refers to the residue numbering of the human IgG1 EU antibody.

[0087] “Framework” or “FR” residues are those variable-domain residues other than the HVR residues as herein defined.

[0088] A “human consensus framework” or “acceptor human framework” is a framework that represents the most commonly occurring amino acid residues in a selection of human immunoglobulin V_{L} or V_{H} framework sequences. Generally, the selection of human immunoglobulin V_{L} or V_{H} sequences is from a subgroup of variable domain sequences. Generally, the subgroup of sequences is a subgroup as in Kabat et al., Sequences of Proteins of Immunological Interest, 5^{th} Ed. Public Health Service, National Institutes of Health, Bethesda, Md. (1991). Examples include for the V_{L}, the subgroup may be subgroup kappa I, kappa II, kappa III or kappa IV as in Kabat et al., supra. Additionally, for the VH, the subgroup may be subgroup I, subgroup II, or subgroup III as in Kabat et al. Alternatively, a human consensus framework can be derived from the above in which particular residues, such as when a human framework residue is selected based on its homology to the donor framework by aligning the donor framework sequence with a collection of various human framework sequences. An acceptor human framework “derived from” a human immunoglobulin framework or a human consensus framework may comprise the same amino acid sequence thereof, or it may contain pre-existing amino acid sequence changes. In some embodiments, the number of pre-existing amino acid changes are 10 or less, 9 or less, 8 or less, 7 or less, 6 or less, 5 or less, 4 or less, 3 or less, or 2 or less.

[0089] An “affinity-matured” antibody is one with one or more alterations in one or more CDRs thereof that result in an improvement in the affinity of the antibody for antigen, compared to a parent antibody that does not possess those alteration(s). In some embodiments, an affinity-matured antibody has nanomolar or even picomolar affinities for the target antigen. Affinity-matured antibodies are produced by procedures known in the art. For example, Marks et al., Bio/Technology 10:779-783 (1992) describes affinity maturation by V_{H}- and V_{L}-domain shuffling. Random mutagenesis of CDR and/or framework residues is described by, for example: Barbas et al. Proc Nat. Acad. Sci. USA 91:3809-3813 (1994); Schier et al. Gene 169:147-155 (1995); Yelton et al. J. Immunol. 155:1994-2004 (1995); Jackson et al., J. Immunol. 154(7):3310-9 (1995); and Hawkins et al, J. Mol. Biol. 226:889-896 (1992).

[0090] The term “epitope” means a protein determinant capable of specific binding to an antibody or antigen-binding fragment (e.g., ligand, receptor, VHH, scFv, Fab, etc.). Epitopes usually consist of chemically active surface groupings of molecules such as amino acids or sugar side chains and usually have specific three-dimensional structural characteristics, as well as specific charge characteristics. Conformational and non-conformational epitopes are distinguished in that the binding to the former but not the latter is lost in the presence of denaturing solvents. As used herein, the term “specifically binds”, “specifically recognizes”, or is “specific for” refers to measurable and reproducible interactions such as binding between a target and an antigen-binding protein (or cytokine and cytokine receptor), which is determinative of the presence of the target (or cytokine) in the presence of a heterogeneous population of molecules including biological molecules. For example, an antigen binding protein (such as a Fab) that specifically binds a target (which can be an epitope) is an antigen binding protein that binds this target with greater affinity, avidity, more readily, and/or with greater duration than it binds other targets. A cytokine that specifically binds a cytokine receptor is a cytokine that binds this cytokine receptor with greater affinity, avidity, more readily, and/or with greater duration than it binds other cytokine receptors. In some embodiments, the extent of binding of an antigen binding protein (or cytokine) to an unrelated target (or unrelated cytokine receptor) is less than about 10% of the binding of the antigen binding protein (or cytokine) to the target as measured (or the cytokine receptor as measured), e.g., by a radioimmunoassay (RIA). In some embodiments, an antigen binding protein that specifically binds a target (or a cytokine that specifically binds a cytokine receptor) has a dissociation constant (K_{D}) of ≤10⁻⁵ M, ≤10⁻⁶ M, ≤10⁻⁷ M, ≤10⁻¹ M, ≤10⁻⁹ M, ≤10¹⁰ M, ≤10⁻¹ M, or ≤10⁻¹² M. In some embodiments, an antigen binding protein (or cytokine receptor) specifically binds an epitope on a protein (or cytokine) that is conserved among the protein from different species. In some embodiments, specific binding can include, but does not require exclusive binding. Binding specificity of the antigen-binding protein (or cytokine and cytokine receptor) can be determined experimentally by any protein binding methods known in the art. Such methods comprise, but are not limited to Western blots, ELISA-, RIA-, ECL-, IRMA-, EIA-, BIACORE™-tests and peptide scans.

[0091] The term “specificity” refers to selective recognition of an antigen binding protein for a particular epitope of an antigen. Natural antibodies, for example, are monospecific. The term “multispecific” as used herein denotes that an antigen binding protein has polyepitopic specificity (i.e., is capable of specifically binding to two, three, or more, different epitopes on one biological molecule or is capable of specifically binding to epitopes on two, three, or more, different biological molecules). “Bispecific” as used herein denotes that an antigen binding protein has two different antigen-binding specificities. Unless otherwise indicated, the order in which the antigens bound by a bispecific antibody listed is arbitrary. That is, for example, the terms “anti-CD3/HIER2,” “anti-HER2/CD3,” “CD3 xHER2” and “HER2xCD3” may be used interchangeably to refer to bispecific antibodies that specifically bind to both CD3 and HER2. The term “monospecific” as used herein denotes an antigen binding protein that has one or more binding sites each of which bind the same epitope of the same antigen.

[0092] The term “valent” as used herein denotes the presence of a specified number of binding sites in an antigen binding protein. A natural antibody for example or a full-length antibody has two binding sites and is bivalent. As such, the terms “trivalent”, “tetravalent”, “pentavalent” and “hexavalent” denote the presence of two binding site, three binding sites, four binding sites, five binding sites, and six binding sites, respectively, in an antigen binding protein.

[0093] “Antibody effector functions” refer to those biological activities attributable to the Fc region (a native sequence Fc region or amino acid sequence variant Fc region) of an antibody and vary with the antibody isotype. Examples of antibody effector functions include: Clq binding and complement dependent cytotoxicity; Fc receptor binding; antibody-dependent cell-mediated cytotoxicity (ADCC); phagocytosis; down regulation of cell surface receptors (e.g., B cell receptors); and B cell activation. “Reduced or minimized” antibody effector function means that which is reduced by at least 50% (alternatively 60%, 65%, 70%, 75%, 80%, 85%, 90%, 95%, 96%, 97%, 98%, or 99%) from the wild type or unmodified antibody. The determination of antibody effector function is readily determinable and measurable by one of ordinary skill in the art. In a preferred embodiment, the antibody effector functions of complement binding, complement dependent cytotoxicity and antibody dependent cytotoxicity are affected. In some embodiments, effector function is eliminated through a mutation in the constant region that eliminated glycosylation, e.g., “effectorless mutation.” In some embodiments, the effectorless mutation is an N297A or DANA mutation (D265A+N297A) in the C_{H}2 region. Shields et al., J. Biol. Chem. 276 (9): 6591-6604 (2001). Alternatively, additional mutations resulting in reduced or eliminated effector function include: K322A and L234A/L235A (LALA). Alternatively, effector function can be reduced or eliminated through production techniques, such as expression in host cells that do not glycosylate (e.g., E. coli.) or in which result in an altered glycosylation pattern that is ineffective or less effective at promoting effector function (e.g., Shinkawa et al., J. Biol. Chem. 278(5): 3466-3473 (2003).

[0094] “Antibody-dependent cell-mediated cytotoxicity” or ADCC refers to a form of cytotoxicity in which secreted Ig bound onto Fc receptors (FcRs) present on certain cytotoxic cells (e.g., natural killer (NK) cells, neutrophils and macrophages) enable these cytotoxic effector cells to bind specifically to an antigen-bearing target cell and subsequently kill the target cell with cytotoxins. The antibodies “arm” the cytotoxic cells and are required for killing of the target cell by this mechanism. The primary cells for mediating ADCC, NK cells, express FcγRIII only, whereas monocytes express FcγRI, FcγRII, and FcγRIII. Fc expression on hematopoietic cells is summarized in Table 2 on page 464 of Ravetch and Kinet, Annu. Rev. Immunol. 9: 457-92 (1991). To assess ADCC activity of a molecule of interest, an in vitro ADCC assay, such as that described in U.S. Pat. No. 5,500,362 or 5,821,337 may be performed. Useful effector cells for such assays include peripheral blood mononuclear cells (PBMC) and natural killer (NK) cells. Alternatively, or additionally, ADCC activity of the molecule of interest may be assessed in vivo, e.g., in an animal model such as that disclosed in Clynes et al., PNAS USA 95:652-656 (1998).

[0095] “Complement dependent cytotoxicity” or “CDC” refers to the lysis of a target cell in the presence of complement. Activation of the classical complement pathway is initiated by the binding of the first component of the complement system (Clq) to antibodies (of the appropriate subclass) which are bound to their cognate antigen. To assess complement activation, a CDC assay, e.g., as described in Gazzano-Santoro et al., J. Immunol. Methods 202: 163 (1996), may be performed. Antibody variants with altered Fc region amino acid sequences and increased or decreased Clq binding capability are described in U.S. Pat. No. 6,194,551B1 and WO99/51642. The contents of those patent publications are specifically incorporated herein by reference. See, also, Idusogie et al. J. Immunol. 164: 4178-4184 (2000).

[0096] The term “Fc region,” “fragment crystallizable region,” “Fc fragment,” or “Fc domain” herein is used to define a C-terminal region of an immunoglobulin heavy chain, including native-sequence Fc regions and variant Fc regions. Although the boundaries of the Fc region of an immunoglobulin heavy chain might vary, the human IgG heavy-chain Fc region is usually defined to stretch from an amino acid residue at position Cys226, or from Pro230, to the carboxyl-terminus thereof. The C-terminal lysine (residue 447 according to the EU numbering system) of the Fc region may be removed, for example, during production or purification of the antibody or Fc-fusion protein, or by recombinantly engineering the nucleic acid encoding a heavy chain of the antibody or Fc-fusion protein. Accordingly, a composition of intact antibodies may comprise antibody populations with all K447 residues removed, antibody populations with no K447 residues removed, and antibody populations having a mixture of antibodies with and without the K447 residue. Suitable native-sequence Fc regions for use in the immunocytokines described herein include human IgG1, IgG2 (IgG2A, IgG2B), IgG3 and IgG4.

[0097] The term IgG “isotype” or “subclass” as used herein is meant any of the subclasses of immunoglobulins defined by the chemical and antigenic characteristics of their constant regions. There are five major classes of immunoglobulins: IgA, IgD, IgE, IgG, and IgM, and several of these may be further divided into subclasses (isotypes), e.g., IgG1, IgG2, IgG3, IgG4, IgA1, and IgA2. The heavy chain constant domains that correspond to the different classes of immunoglobulins are called α, γ, ε, γ, and μ, respectively. The subunit structures and three-dimensional configurations of different classes of immunoglobulins are well known and described generally in, for example, Abbas et al. Cellular and Mol. Immunology, 4th ed. (W.B. Saunders, Co., 2000).

[0098] “Fc receptor” or “FcR” describes a receptor that binds the Fc region of an antibody or Fc-fusion protein. The preferred FcR is a native sequence human FcR. Moreover, a preferred FcR is one which binds an IgG antibody (a gamma receptor) and includes receptors of the FcγRI, FcγRII, and FcγRIII subclasses, including allelic variants and alternatively spliced forms of these receptors, FcγRII receptors include FcγRIIA (an “activating receptor”) and FcγRIIB (an “inhibiting receptor”), which have similar amino acid sequences that differ primarily in the cytoplasmic domains thereof. Activating receptor FcγRIIA contains an immunoreceptor tyrosine-based activation motif (ITAM) in its cytoplasmic domain. Inhibiting receptor FcγRIIB contains an immunoreceptor tyrosine-based inhibition motif (ITIM) in its cytoplasmic domain. (See M. Daëron, Annu. Rev. Immunol. 15:203-234 (1997). FcRs are reviewed in Ravetch and Kinet, Annu. Rev. Immunol. 9: 457-92 (1991); Capel et al., Immunomethods 4: 25-34 (1994); and de Haas et al., J. Lab. Clin. Med. 126: 330-41 (1995). Other FcRs, including those to be identified in the future, are encompassed by the term “FcR” herein.

[0099] The term “Fc receptor” or “FcR” also includes the neonatal receptor, FcRn, which is responsible for the transfer of maternal IgGs to the fetus. Guyer et al., J. Immunol. 117: 587 (1976) and Kim et al., J. Immunol. 24: 249 (1994). Methods of measuring binding to FcRn are known (see, e.g., Ghetie and Ward, Immunol. Today 18: (12): 592-8 (1997); Ghetie et al., Nature Biotechnology 15 (7): 637-40 (1997); Hinton et al., J. Biol. Chem. 279 (8): 6213-6 (2004); WO 2004/92219 (Hinton et al.). Binding to FcRn in vivo and serum half-life of human FcRn high-affinity binding polypeptides can be assayed, e.g., in transgenic mice or transfected human cell lines expressing human FcRn, or in primates to which the polypeptides having a variant Fc region are administered. WO 2004/42072 (Presta) describes antibody variants which improved or diminished binding to FcRs. See also, e.g., Shields et al., J. Biol. Chem. 9(2): 6591-6604 (2001).

[0100] “Binding affinity” generally refers to the strength of the sum total of non-covalent interactions between a single binding site of a molecule (e.g., an antibody, antigen-binding fragment (such as ligand, receptor, VHH, scFv, etc.), or cytokine) and its binding partner (e.g., an antigen (such as cell surface molecule, receptor, ligand, etc.), or cytokine receptor). Unless indicated otherwise, as used herein, “binding affinity” refers to intrinsic binding affinity that reflects a 1:1 interaction between members of a binding pair. Binding affinity can be indicated by K_{d}, K_{off}, Kₒₙ, or Kₐ. The term “K_{off}”, as used herein, is intended to refer to the off-rate constant for dissociation of an antibody (or antigen-binding fragment) from the antibody (or antigen-binding fragment)/antigen complex (e.g., ligand-receptor complex), or the off rate constant for dissociation of a cytokine from the cytokine/cytokine receptor complex, as determined from a kinetic selection set up, expressed in units of s⁻¹. The term “Kₒₙ”, as used herein, is intended to refer to the on-rate constant for association of an antibody (or antigen-binding fragment) to the antigen to form the antibody (or antigen-binding fragment)/antigen complex, or the on rate constant for association of a cytokine to the cytokine receptor to form the cytokine/cytokine receptor complex, expressed in units of M⁻¹s⁻¹. The term equilibrium dissociation constant “K_{D}” or “K_{d}”, as used herein, refers to the dissociation constant of a particular antibody (or antigen-binding fragment)-antigen interaction (or cytokine-cytokine receptor interaction), and describes the concentration of antigen (or cytokine) required to occupy one half of all of the antibody-binding domains (or antigen-binding fragment) present in a solution of antibody (or antigen-binding fragment) molecules (or cytokine receptor) at equilibrium, and is equal to K_{off}/Kₒₙ, expressed in units of M. The measurement of Kₐ presupposes that all binding agents are in solution. In the case where the antibody (or antigen-binding fragment) is tethered to a cell wall, e.g., in a yeast expression system, the corresponding equilibrium rate constant is expressed as EC50, which gives a good approximation of Kₐ. The affinity constant, K_{d}, is the inverse of the dissociation constant, K_{d}, expressed in units of M⁻¹. The dissociation constant (K_{D} or K_{d}) is used as an indicator showing affinity of antibodies (or antigen-binding fragments) to antigens (or cytokines to cytokine receptors). For example, easy analysis is possible by the Scatchard method using antibodies (or antigen-binding fragments) marked with a variety of marker agents, as well as by using BIACORE™ X (made by Amersham Biosciences), which is an over-the-counter, measuring kit, or similar kit, according to the user's manual and experiment operation method attached with the kit. The K_{D} value that can be derived using these methods is expressed in units of M (Mols). An antibody or antigen-binding fragment thereof (or cytokine) that specifically binds to a target (or cytokine receptor) may have a dissociation constant (K_{d}) of, for example, ≤10⁻⁵ M, ≤10⁻⁶ M, ≤10⁻⁷ M, ≤10⁻¹ M, ≤10⁻⁹ M, ≤10⁻¹⁰ M, ≤10⁻¹¹ M, or ≤10⁻² M.

[0101] Half maximal inhibitory concentration (IC₅₀) is a measure of the effectiveness of a substance (such as an antibody or antigen-binding fragment) in inhibiting a specific biological or biochemical function. It indicates how much of a particular drug or other substance (inhibitor, such as an antibody or antigen-binding fragment) is needed to inhibit a given biological process by half. The values are typically expressed as molar concentration. IC₅₀ is comparable to an “EC₅₀” for agonist drug or other substance (such as an antibody, antigen-binding fragment, or a cytokine). EC₅₀ also represents the plasma concentration required for obtaining 50% of a maximum effect in vivo. As used herein, an “IC₅₀” is used to indicate the effective concentration of an antibody or antigen-binding fragment needed to neutralize 50% of the antigen bioactivity in vitro. IC₅₀ or EC₅₀ can be measured by bioassays such as inhibition of ligand binding by FACS analysis (competition binding assay), cell-based cytokine release assay, or amplified luminescent proximity homogeneous assay (AlphaLISA).

[0102] “Covalent bond” as used herein refers to a stable bond between two atoms sharing one or more electrons. Examples of covalent bonds include, but are not limited to, peptide bonds and disulfide bonds. As used herein, “peptide bond” refers to a covalent bond formed between a carboxyl group of an amino acid and an amine group of an adjacent amino acid. A “disulfide bond” as used herein refers to a covalent bond formed between two sulfur atoms, such as a combination of two Fc fragments (or cytokine subunits) by one or more disulfide bonds. One or more disulfide bonds may be formed between the two fragments by linking the thiol groups in the two fragments. In some embodiments, one or more disulfide bonds can be formed between one or more cysteines of two Fc fragments. Disulfide bonds can be formed by oxidation of two thiol groups. In some embodiments, the covalent linkage is directly linked by a covalent bond. In some embodiments, the covalent linkage is directly linked by a peptide bond or a disulfide bond.

[0103] “Percent (%) amino acid sequence identity” and “homology” with respect to a peptide, polypeptide or antibody sequence are defined as the percentage of amino acid residues in a candidate sequence that are identical with the amino acid residues in the specific peptide or polypeptide sequence, after aligning the sequences and introducing gaps, if necessary, to achieve the maximum percent sequence identity, and not considering any conservative substitutions as part of the sequence identity. Alignment for purposes of determining percent amino acid sequence identity can be achieved in various ways that are within the skill in the art, for instance, using publicly available computer software such as BLAST, BLAST-2, ALIGN or MEGALIGN™ (DNASTAR) software. Those skilled in the art can determine appropriate parameters for measuring alignment, including any algorithms needed to achieve maximal alignment over the full-length of the sequences being compared.

[0104] As used herein, the “C terminus” of a polypeptide refers to the last amino acid residue of the polypeptide which donates its amine group to form a peptide bond with the carboxyl group of its adjacent amino acid residue. “N terminus” of a polypeptide as used herein refers to the first amino acid of the polypeptide which donates its carboxyl group to form a peptide bond with the amine group of its adjacent amino acid residue.

[0105] An “isolated” nucleic acid molecule encoding a construct, antibody, or antigen-binding fragment thereof described herein is a nucleic acid molecule that is identified and separated from at least one contaminant nucleic acid molecule with which it is ordinarily associated in the environment in which it was produced. Preferably, the isolated nucleic acid is free of association with all components associated with the production environment. The isolated nucleic acid molecules encoding the constructs, polypeptides, and antibodies described herein is in a form other than in the form or setting in which it is found in nature. Isolated nucleic acid molecules therefore are distinguished from nucleic acid encoding the constructs, polypeptides and antibodies described herein existing naturally in cells. An isolated nucleic acid includes a nucleic acid molecule contained in cells that ordinarily contain the nucleic acid molecule, but the nucleic acid molecule is present extrachromosomally or at a chromosomal location that is different from its natural chromosomal location.

[0106] The term “control sequences” refers to DNA sequences necessary for the expression of an operably linked coding sequence in a particular host organism. The control sequences that are suitable for prokaryotes, for example, include a promoter, optionally an operator sequence, and a ribosome binding site. Eukaryotic cells are known to utilize promoters, polyadenylation signals, and enhancers.

[0107] Nucleic acid is “operably linked” when it is placed into a functional relationship with another nucleic acid sequence. For example, DNA for a presequence or secretory leader is operably linked to DNA for a polypeptide if it is expressed as a preprotein that participates in the secretion of the polypeptide; a promoter or enhancer is operably linked to a coding sequence if it affects the transcription of the sequence; or a ribosome binding site is operably linked to a coding sequence if it is positioned so as to facilitate translation. Generally, “operably linked” means that the DNA sequences being linked are contiguous, and, in the case of a secretory leader, contiguous and in reading phase. However, enhancers do not have to be contiguous. Linking is accomplished by ligation at convenient restriction sites. If such sites do not exist, the synthetic oligonucleotide adaptors or linkers are used in accordance with conventional practice.

[0108] The term “vector,” as used herein, refers to a nucleic acid molecule capable of propagating another nucleic acid to which it is linked. The term includes the vector as a self-replicating nucleic acid structure as well as the vector incorporated into the genome of a host cell into which it has been introduced. Certain vectors are capable of directing the expression of nucleic acids to which they are operatively linked. Such vectors are referred to herein as “expression vectors.”

[0109] The term “transfected” or “transformed” or “transduced” as used herein refers to a process by which exogenous nucleic acid is transferred or introduced into the host cell. A “transfected” or “transformed” or “transduced” cell is one which has been transfected, transformed or transduced with exogenous nucleic acid. The cell includes the primary subject cell and its progeny.

[0110] The terms “host cell,” “host cell line,” and “host cell culture” are used interchangeably and refer to cells into which exogenous nucleic acid has been introduced, including the progeny of such cells. Host cells include “transformants” and “transformed cells,” which include the primary transformed cell and progeny derived therefrom without regard to the number of passages. Progeny may not be completely identical in nucleic acid content to a parent cell, but may contain mutations. Mutant progeny that have the same function or biological activity as screened or selected for in the originally transformed cell are included herein.

[0111] The term “pharmaceutical formulation” of “pharmaceutical composition” refers to a preparation that is in such form as to permit the biological activity of the active ingredient to be effective, and that contains no additional components that are unacceptably toxic to a subject to which the formulation would be administered. Such formulations are sterile. A “sterile” formulation is aseptic or free from all living microorganisms and their spores.

[0112] It is understood that embodiments of the invention described herein include “consisting” and/or “consisting essentially of” embodiments.

[0113] Reference to “about” a value or parameter herein includes (and describes) variations that are directed to that value or parameter per se. For example, description referring to “about X” includes description of “X”.

[0114] As used herein, reference to “not” a value or parameter generally means and describes “other than” a value or parameter. For example, the method is not used to treat cancer of type X means the method is used to treat cancer of types other than X.

[0115] The term “about X-Y” used herein has the same meaning as “about X to about Y.”

[0116] As used herein and in the appended claims, the singular forms “a,” “or,” and “the” include plural referents unless the context clearly dictates otherwise.

### II. Immunocytokines

[0117] The present invention in one aspect provides an immunocytokine comprising a cytokine or variant thereof positioned at a hinge region of a heavy chain of an antibody, or positioned at a hinge region between an antigen-binding fragment (e.g., ligand, receptor, or antibody fragment) and an Fc domain subunit or portion thereof. The parental antibody that serves as the backbone for constructing the immunocytokines described herein can be of any antibody or antigen-binding fragment format that comprises a heavy chain comprising a hinge region, such as a full-length 4-chain antibody, a heavy chain only antibody, or an antigen-binding fragment (e.g., scFv, Fab) fused to an Fc domain subunit or portion thereof (e.g., CH2+CH3, or CH2 only) via a hinge region. The parental antigen-binding protein that serves as the backbone for constructing the immunocytokines described herein can also be an antigen-binding fragment-hinge-Fc fusion protein, such as an antigen-binding fragment-hinge-Fc fusion protein comprising two antigen-binding fragment-hinge-Fc fusion polypeptides each comprising from N′ to C′: an antigen-binding fragment (e.g., ligand, or receptor), a hinge region, and an Fc domain subunit or portion thereof.

[0118] In some embodiments, there is provided an immunocytokine comprising: a) an antigen-binding protein (e.g., antibody such as full-length antibody, or antigen-binding fragment-hinge-Fc fusion protein such as ligand/receptor-hinge-Fc fusion protein) specifically recognizing a target antigen (e.g., CTLA-4, PD-L1, PD-L2, CD25, HER2, PD-1, CD3, CD4, CD123, or CD8); and b) a cytokine (e.g., IL-2, IFN-α (e.g., IFN-α2b), IFN-γ, IL-10, IL-12, or IL-23) or variant thereof, wherein the antigen-binding protein comprises an antigen-binding polypeptide (e.g., antibody heavy chain, or antigen-binding fragment-hinge-Fc fusion polypeptide such as ligand/receptor-hinge-Fc fusion polypeptide) comprising from N′ to C′: an antigen-binding fragment (e.g., ligand, receptor, VHH, scFv, or VH), a hinge region, and an Fc domain subunit or portion thereof (e.g., CH2+CH3, or CH2 only), and wherein the cytokine or variant thereof is positioned at (e.g., at the N′ of, at the C′ of, or within) the hinge region. In some embodiments, the antigen-binding protein is an antibody (e.g., full-length antibody) specifically recognizing the target antigen, the antigen-binding polypeptide comprising the hinge region is a heavy chain of the antibody, and the cytokine or variant thereof is positioned at the hinge region of the heavy chain. Thus, in some embodiments, there is provided an immunocytokine comprising: a) an antibody (e.g., full-length antibody, heavy chain only antibody, or antigen-binding fragment (e.g., scFv, Fab) fused to an Fc domain subunit or portion thereof via a hinge region) specifically recognizing a target antigen (e.g., CTLA-4, PD-L1, PD-L2, CD25, HER2, PD-1, CD3, CD4, CD123, or CD8); and b) a cytokine (e.g., IL-2, IFN-α (e.g., IFN-α2b), IFN-γ, IL-10, IL-12, or IL-23) or variant thereof, wherein the antibody comprises a heavy chain comprising a hinge region, and wherein the cytokine or variant thereof is positioned at the hinge region (e.g., within the hinge region, between the C-terminus of CH1 and the N-terminus of the hinge region of a heavy chain of the full-length antibody, or between the C-terminus of the antigen-binding fragment and the N-terminus of the hinge region). In some embodiments, there is provided an immunocytokine comprising: a) an antibody specifically recognizing a target antigen (e.g., CTLA-4, PD-L1, PD-L2, CD25, HER2, PD-1, CD3, CD4, CD123, or CD8); and b) a cytokine (e.g., IL-2, IFN-α (e.g., IFN-α2b), IFN-γ, IL-10, IL-12, or IL-23) or variant thereof, wherein the antibody comprises a heavy chain, and wherein the heavy chain comprises from N-terminus to C-terminus: a VH domain, optionally a CH1 domain, the cytokine or variant thereof at a hinge region, a CH2 domain, and optionally a CH3 domain. In some embodiments, there is provided an immunocytokine comprising: (a) a first antigen-binding polypeptide comprising from N-terminus to C-terminus: a first VH domain, an optional first CH1, a cytokine (e.g., IL-2, IFN-α (e.g., IFN-α2b), IFN-γ, IL-10, IL-12, or IL-23) or variant thereof at a first hinge region (e.g., the cytokine moiety is between the C-terminus of CH1 and the N-terminus of the hinge region, or between the C-terminus of the hinge region and the N-terminus of the Fc domain subunit, or within the hinge region), and a first subunit of an Fc domain or portion thereof (e.g., CH2+CH3, or CH2 only); (b) a second antigen-binding polypeptide comprising from N-terminus to C-terminus: a second VH domain, an optional second CH1, a second hinge region, and a second subunit of the Fc domain or portion thereof (e.g., CH2+CH3, or CH2 only); (c) a third antigen-binding polypeptide comprising from N-terminus to C-terminus: a first VL domain and an optional first CL; and (d) a fourth antigen-binding polypeptide comprising from N-terminus to C-terminus: a second VL domain and an optional second CL; wherein the first VH and the first VL and optionally the first CH1 and first CL form a first antigen-binding domain (e.g., Fab) specifically recognizing a first target antigen (e.g., CTLA-4, PD-L1, PD-L2, CD25, HER2, PD-1, CD3, CD4, CD123, or CD8); and wherein the second VH and the second VL and optionally the second CH1 and second CL form a second antigen-binding domain (e.g., Fab) specifically recognizing a second target antigen (e.g., CTLA-4, PD-L1, PD-L2, CD25, HER2, PD-1, CD3, CD4, CD123, or CD8). In some embodiments, the immunocytokine described herein comprises a full-length parental antibody (hereinafter also referred to as “full-length antibody immunocytokine”). Thus in some embodiments, there is provided an immunocytokine comprising: a) a full-length antibody specifically recognizing a target antigen (e.g., CTLA-4, PD-L1, PD-L2, CD25, HER2, PD-1, CD3, CD4, CD123, or CD8); and b) a cytokine (e.g., IL-2, IFN-α (e.g., IFN-α2b), IFN-γ, IL-10, IL-12, or IL-23) or variant thereof, wherein the cytokine or variant thereof is positioned at the hinge region (e.g., within the hinge region, or between the C-terminus of CH1 and the N-terminus of the hinge region) of a heavy chain of the full-length antibody. In some embodiments, the antigen-binding protein is an antigen-binding fragment-hinge-Fc fusion protein (the corresponding immunocytokine hereinafter is also referred to as “Fc-fusion protein immunocytokine”), such as scFv-hinge-Fc fusion protein, VHH-hinge-Fc fusion protein, ligand-hinge-Fc fusion protein, or receptor-hinge-Fc fusion protein. In some embodiments, the antigen-binding fragment is a ligand, and the target antigen is a receptor specifically recognized by the ligand. In some embodiments, the antigen-binding fragment is a receptor, and the target antigen is a ligand specifically recognized by the receptor. In some embodiments, the parental antigen-binding fragment-hinge-Fc fusion protein used as backbone for constructing the immunocytokine described herein comprises two antigen-binding fragment-hinge-Fc fusion polypeptides each comprising from N′ to C′: an antigen-binding fragment (e.g., ligand, receptor, VHH, or scFv), a hinge region, and an Fc domain subunit or portion thereof. Thus, in some embodiments, there is provided an immunocytokine comprising: a) an antigen-binding fragment-hinge-Fc fusion protein specifically recognizing a target antigen (e.g., CTLA-4, PD-L1, PD-L2, CD25, HER2, PD-1, CD3, CD4, CD123, or CD8); and b) a cytokine (e.g., IL-2, IFN-α (e.g., IFN-α2b), IFN-γ, IL-10, IL-12, or IL-23) or variant thereof, wherein the antigen-binding fragment-hinge-Fc fusion protein comprises an antigen-binding fragment-hinge-Fc fusion polypeptide comprising from N′ to C′: an antigen-binding fragment (e.g., ligand, receptor, VHH, or scFv), a hinge region, and an Fc domain subunit or portion thereof (e.g., CH2+CH3, or CH2 only), and wherein the cytokine or variant thereof is positioned at (e.g., at the N′ of, at the C′ of, or within) the hinge region. In some embodiments, there is provided an immunocytokine comprising: (a) a first antigen-binding polypeptide comprising from N-terminus to C-terminus: a first antigen-binding fragment (e.g., ligand, receptor, VHH, or scFv), a cytokine (e.g., IL-2, IFN-α (e.g., IFN-α2b), IFN-γ, IL-10, IL-12, or IL-23) or variant thereof at a first hinge region (e.g., the cytokine moiety is between the C-terminus of the antigen-binding fragment and the N-terminus of the hinge region, between the C-terminus of the hinge region and the N-terminus of the Fc domain subunit, or within the hinge region), and a first subunit of an Fc domain or portion thereof (e.g., CH2+CH3, or CH2 only); (b) a second antigen-binding polypeptide comprising from N-terminus to C-terminus: a second antigen-binding fragment (e.g., ligand, receptor, VHH, or scFv), a second hinge region, and a second subunit of the Fc domain or portion thereof (e.g., CH2+CH3, or CH2 only); wherein the first antigen-binding fragment specifically recognizes a first target antigen (e.g., CTLA-4, PD-L1, PD-L2, CD25, HER2, PD-1, CD3, CD4, CD123, or CD8); and wherein the second antigen-binding fragment specifically recognizes a second target antigen (e.g., CTLA-4, PD-L1, PD-L2, CD25, HER2, PD-1, CD3, CD4, CD123, or CD8). In some embodiments, in the presence of binding of the antigen-binding protein (e.g., antibody (e.g., full-length antibody), or ligand/receptor-hinge-Fc fusion protein) or antigen-binding fragment (e.g., ligand, receptor, VHH, scFv, Fab) to the target antigen, the activity (binding affinity to corresponding cytokine receptor or subunit thereof, and/or biological activity) of the cytokine or variant thereof increases at least about 20% (such as at least about any of 30%, 40%, 50%, 60%, 70%, 80%, 90%, 100%, 200%, 300%, 400%, 500%, or more) compared to that in the absence of binding of the antigen-binding protein (e.g., antibody (e.g., full-length antibody), or ligand/receptor-hinge-Fc fusion protein) or antigen binding fragment (e.g., ligand, receptor, VHH, scFv, Fab) to the target antigen. In some embodiments, in the absence of binding of the antigen-binding protein (e.g., antibody (e.g., full-length antibody), or ligand/receptor-hinge-Fc fusion protein) or antigen binding fragment (e.g., ligand, receptor, VHH, scFv, Fab) to the target antigen, the activity (binding affinity to corresponding cytokine receptor or subunit thereof, and/or biological activity) of the cytokine or variant thereof positioned at the hinge region is no more than about 70% (such as no more than about any of 60%, 50%, 40%, 30%, 20%, 10%, 9%, 8%, 7%, 6%, 5%, 4%, 3%, 2%, %, 0.9%, 0.8%, 0.7%, 0.6%, 0.5%, 0.4%, 0.3%, 0.2%, 0.1%, or 0%) of that of a corresponding cytokine or variant thereof in a free state. In some embodiments, the cytokine or variant thereof is a cytokine variant, and wherein the activity (binding affinity to corresponding cytokine receptor or subunit thereof, and/or biological activity) of the cytokine variant in a free state is no more than about 80% (such as no more than about any of 70%, 60%, 50%, 40%, 30%, 20%, 10%, or 5%) of that of a corresponding wildtype cytokine in a free state. In some embodiments, the antibody (e.g., full-length antibody, or antigen binding fragment fused to Fc domain or portion thereof) comprises two heavy chains each comprising a hinge region, and only one heavy chain comprises the cytokine or variant thereof positioned at the hinge region. In some embodiments, the antigen-binding protein (e.g., antibody such as full-length antibody, or antigen-binding fragment-hinge-Fc fusion protein such as ligand/receptor-hinge-Fc fusion protein) comprises two antigen-binding polypeptides (e.g., antibody heavy chain, or antigen-binding fragment-hinge-Fc fusion polypeptide such as ligand/receptor-hinge-Fc fusion polypeptide) each comprising a hinge region, and wherein only one antigen-binding polypeptide comprises the cytokine or variant thereof positioned at (e.g., at the N′ of, at the C′ of, or within) the hinge region. In some embodiments, the antigen-binding protein (e.g., antibody such as full-length antibody, or antigen-binding fragment-hinge-Fc fusion protein such as ligand/receptor-hinge-Fc fusion protein) comprises two antigen-binding polypeptides (e.g., antibody heavy chain, or antigen-binding fragment-hinge-Fc fusion polypeptide such as ligand/receptor-hinge-Fc fusion polypeptide) each comprising a hinge region, and wherein each antigen-binding polypeptide comprises a cytokine or variant thereof positioned at (e.g., at the N′ of, at the C′ of, or within) the hinge region. In some embodiments, the antibody (e.g., full-length antibody, or antigen binding fragment fused to Fc domain or portion thereof) comprises two heavy chains each comprising a hinge region, and each heavy chain comprises a cytokine or variant thereof positioned at the hinge region. In some embodiments, the immunocytokine comprises two or more (e.g., 2, 3, 4, 5, or more) cytokines or variants thereof, wherein the two or more cytokines or variant thereof are positioned in tandem (e.g., connected via an optional peptide linker) at the hinge region of the antigen-binding polypeptide (e.g., heavy chain of an antibody, or antigen-binding fragment-hinge-Fc fusion polypeptide such as ligand/receptor-hinge-Fc fusion polypeptide). In some embodiments, the cytokine or variant thereof is a monomeric cytokine or variant thereof, such as IL-2 or IFN-α (e.g., IFN-α2a, IFN-α2b, IFN-α2c). In some embodiments, the cytokine or variant thereof is a dimeric cytokine or variant thereof. In some embodiments, the cytokine or variant thereof is a homodimeric cytokine or variant thereof, such as IL-10 or IFN-γ. In some embodiments, the cytokine or variant thereof is a heterodimeric cytokine or variant thereof, such as IL-12 or IL-23.

[0119] In some embodiments, both subunits of the dimeric cytokine or variant thereof are positioned in tandem (e.g., connected via an optional peptide linker) at the hinge region of the antigen-binding polypeptide (e.g., heavy chain of an antibody, or antigen-binding fragment-hinge-Fc fusion polypeptide such as ligand/receptor-hinge-Fc fusion polypeptide). In some embodiments, the antigen-binding protein (e.g., antibody such as full-length antibody, or antigen-binding fragment-hinge-Fc fusion protein such as ligand/receptor-hinge-Fc fusion protein) comprises two antigen-binding polypeptides (e.g., heavy chains, or antigen-binding fragment-hinge-Fc fusion polypeptides such as ligand/receptor-hinge-Fc fusion polypeptides) each comprising a hinge region, one subunit of the dimeric cytokine or variant thereof is positioned at the hinge region of one antigen-binding polypeptide (e.g., heavy chain, or antigen-binding fragment-hinge-Fc fusion polypeptide such as ligand/receptor-hinge-Fc fusion polypeptide), and the other subunit of the dimeric cytokine or variant thereof is positioned at the hinge region of the other antigen-binding polypeptide (e.g., heavy chain, or antigen-binding fragment-hinge-Fc fusion polypeptide such as ligand/receptor-hinge-Fc fusion polypeptide). In some embodiments, the parental antigen-binding protein (e.g., antibody such as full-length antibody, or antigen-binding fragment-hinge-Fc fusion protein such as ligand/receptor-hinge-Fc fusion protein) is homodimeric. In some embodiments, the parental antigen-binding protein (e.g., antibody such as full-length antibody, or antigen-binding fragment-hinge-Fc fusion protein such as ligand/receptor-hinge-Fc fusion protein) is heterodimeric. In some embodiments, the two or more cytokines or variants thereof are the same. In some embodiments, the two or more cytokines or variants thereof are different. In some embodiments, the antigen-binding protein (e.g., antibody or fragment thereof, or antigen-binding fragment-hinge-Fc fusion protein such as ligand/receptor-hinge-Fc fusion protein) is monospecific. In some embodiments, the antigen-binding protein (e.g., antibody or fragment thereof, or antigen-binding fragment-hinge-Fc fusion protein such as ligand/receptor-hinge-Fc fusion protein) is multispecific. In some embodiments, the cytokine or variant thereof is selected from the group consisting of IL-1, IL-2, IL-3, IL-4, IL-5, IL-6, IL-7, IL-8, IL-9, IL-10, IL-12, IL-15, IL-17, IL-18, IL-21, IL-22, IL-23, IL-27, IL-35, IFN-α, IFN-β, IFN-γ, TNF-α, TGF-β, erythropoietin, VEGF, thrombopoietin, G-CSF, M-CSF, SCF, and GM-CSF. In some embodiments, the cytokine or variant thereof is positioned between the C-terminus of antigen-binding fragment (e.g., scFv, VHH, ligand, receptor) and the N-terminus of the hinge region of the antigen-binding polypeptide. In some embodiments, the heavy chain of the antibody (e.g., full-length antibody) comprises a constant region 1 (CH1), and the cytokine or variant thereof is positioned between the C-terminus of CH1 and the N-terminus of the hinge region of the heavy chain of the antibody. In some embodiments, the cytokine or variant thereof is positioned between the C-terminus of the hinge region and the N-terminus of the Fc domain subunit (or portion thereof) of the antigen-binding polypeptide (e.g., heavy chain of an antibody, or antigen-binding fragment-hinge-Fc fusion protein). In some embodiments, the cytokine or variant thereof is positioned within the hinge region (e.g., replaces an internal portion of the hinge region, inserted within the hinge region and introducing one or more additional hinge or linker amino acids, or inserted within the hinge region without deleting hinge region amino acid) of the antigen-binding polypeptide (e.g., heavy chain of an antibody, or fragment thereof, or antigen-binding fragment-hinge-Fc fusion protein such as ligand/receptor-hinge-Fc fusion protein). In some embodiments, the antigen-binding polypeptide (e.g., heavy chain of an antibody or antigen-binding fragment-hinge-Fc fusion protein such as ligand/receptor-hinge-Fc fusion protein), such as the Fc domain subunit or portion thereof, comprises a knobs-into-holes (KIH) mutation (e.g., each antigen-binding polypeptide (e.g., heavy chain of a full-length antibody) comprises a KIH mutation). In some embodiments, the antigen-binding protein is an agonist antibody (or antigen-binding fragment thereof) or ligand (e.g., PD-L2, PD-L1, CD80, or CD86) that can activate or stimulate an immunosuppressive signaling pathway (e.g., by binding to an inhibitory immune checkpoint molecule such as PD-1 or CTLA-4 on a target cell), and the cytokine or variant thereof is an immunostimulating cytokine or variant thereof (e.g., IL-2, IL-12, or IL-23). In some embodiments, the antigen-binding protein is an antagonist antibody (or antigen-binding fragment thereof), a ligands, or a receptor that can reduce or block an immunostimulatory signaling pathway (e.g., by binding to a stimulatory immune checkpoint molecule such as CD27 or CD28 or an immunostimulatory receptor such as IL-2R), and the cytokine or variant thereof is an immunostimulating cytokine or variant thereof (e.g., IL-2, IL-12, or IL-23). In some embodiments, the antigen-binding protein is an antagonist antibody (or antigen-binding fragment thereof), a ligand, or a receptor that can reduce or block an immunosuppressive signaling pathway (e.g., by binding to an inhibitory immune checkpoint molecule such as PD-1 or CTLA-4), and the cytokine or variant thereof is an immunosuppressive cytokine or variant thereof (e.g., IL-10, IL-27, IL-35, TGF-β). In some embodiments, the antigen-binding protein is an agonist antibody (or antigen-binding fragment thereof) or ligand (e.g., CD70, CD80, CD86, or IL-2) that can activate or stimulate an immunostimulatory signaling pathway (e.g., by binding to a stimulatory immune checkpoint molecule such as CD27 or CD28, or an immunostimulatory receptor such as IL-2R), and the cytokine or variant thereof is an immunosuppressive cytokine or variant thereof (e.g., IL-10, IL-27, IL-35, TGF-β).

[0120] In some embodiments, there is provided an immunocytokine comprising: a) an antigen-binding protein (e.g., antibody such as full-length antibody, or antigen-binding fragment-hinge-Fc fusion protein such as ligand/receptor-hinge-Fc fusion protein) specifically recognizing a target antigen (e.g., CTLA-4, PD-L1, PD-L2, CD25, HER2, PD-1, CD3, CD4, CD123, or CD8); and b) a cytokine (e.g., IL-2, IFN-α (e.g., IFN-α2b), IFN-γ, IL-10, IL-12, or IL-23) or variant thereof, wherein the antigen-binding protein comprises an antigen-binding polypeptide (e.g., antibody heavy chain, or antigen-binding fragment-hinge-Fc fusion polypeptide such as ligand/receptor-hinge-Fc fusion polypeptide) comprising from N′ to C′: an antigen-binding fragment (e.g., ligand, receptor, VHH, scFv, or VH), a hinge region, and an Fc domain subunit or portion thereof (e.g., CH2+CH3, or CH2 only), wherein the cytokine or variant thereof is positioned at (e.g., at the N′ of, at the C′ of, or within) the hinge region; and wherein in the presence of binding of the antigen-binding protein (e.g., antibody (e.g., full-length antibody), or ligand/receptor-hinge-Fc fusion protein) or antigen-binding fragment (e.g., ligand, receptor, VHH, scFv, Fab) to the target antigen, the activity (binding affinity to corresponding cytokine receptor or subunit thereof, and/or biological activity) of the cytokine or variant thereof increases at least about 20% (such as at least about any of 30%, 40%, 50%, 60%, 70%, 80%, 90%, 100%, 200%, 300%, 400%, 500%, or more) compared to that in the absence of binding of the antigen-binding protein (e.g., antibody (e.g., full-length antibody), or ligand/receptor-hinge-Fc fusion protein) or antigen binding fragment (e.g., ligand, receptor, VHH, scFv, Fab) to the target antigen. In some embodiments, there is provided an immunocytokine comprising: a) an antigen-binding protein (e.g., antibody such as full-length antibody, or antigen-binding fragment-hinge-Fc fusion protein such as ligand/receptor-hinge-Fc fusion protein) specifically recognizing a target antigen (e.g., CTLA-4, PD-L1, PD-L2, CD25, HER2, PD-1, CD3, CD4, CD123, or CD8); and b) a cytokine (e.g., IL-2, IFN-α (e.g., IFN-α2b), IFN-γ, IL-10, IL-12, or IL-23) or variant thereof, wherein the antigen-binding protein comprises an antigen-binding polypeptide (e.g., antibody heavy chain, or antigen-binding fragment-hinge-Fc fusion polypeptide such as ligand/receptor-hinge-Fc fusion polypeptide) comprising from N′ to C′: an antigen-binding fragment (e.g., ligand, receptor, VHH, scFv, or VH), a hinge region, and an Fc domain subunit or portion thereof (e.g., CH2+CH3, or CH2 only), wherein the cytokine or variant thereof is positioned at (e.g., at the N′ of, at the C′ of, or within) the hinge region; and wherein in the absence of binding of the antigen-binding protein (e.g., antibody (e.g., full-length antibody), or ligand/receptor-hinge-Fc fusion protein) or antigen binding fragment (e.g., ligand, receptor, VHH, scFv, Fab) to the target antigen, the activity (binding affinity to corresponding cytokine receptor or subunit thereof, and/or biological activity) of the cytokine or variant thereof positioned at the hinge region is no more than about 70% (such as no more than about any of 60%, 50%, 40%, 30%, 20%, 10%, 9%, 8%, 7%, 6%, 5%, 4%, 3%, 2%, 1%, 0.9%, 0.8%, 0.7%, 0.6%, 0.5%, 0.4%, 0.3%, 0.2%, 0.1%, or 0%) of that of a corresponding cytokine or variant thereof in a free state. In some embodiments, there is provided an immunocytokine comprising: a) an antigen-binding protein (e.g., antibody such as full-length antibody, or antigen-binding fragment-hinge-Fc fusion protein such as ligand/receptor-hinge-Fc fusion protein) specifically recognizing a target antigen (e.g., CTLA-4, PD-L1, PD-L2, CD25, HER2, PD-1, CD3, CD4, CD123, or CD8); and b) a cytokine (e.g., IL-2, IFN-α (e.g., IFN-α2b), IFN-γ, IL-10, IL-12, or IL-23) or variant thereof, wherein the antigen-binding protein comprises an antigen-binding polypeptide (e.g., antibody heavy chain, or antigen-binding fragment-hinge-Fc fusion polypeptide such as ligand/receptor-hinge-Fc fusion polypeptide) comprising from N′ to C′: an antigen-binding fragment (e.g., ligand, receptor, VHH, scFv, or VH), a hinge region, and an Fc domain subunit or portion thereof (e.g., CH2+CH3, or CH2 only), wherein the cytokine or variant thereof is positioned at (e.g., at the N′ of, at the C′ of, or within) the hinge region; wherein in the presence of binding of the antigen-binding protein (e.g., antibody (e.g., full-length antibody), or ligand/receptor-hinge-Fc fusion protein) or antigen-binding fragment (e.g., ligand, receptor, VHH, scFv, Fab) to the target antigen, the activity (binding affinity to corresponding cytokine receptor or subunit thereof, and/or biological activity) of the cytokine or variant thereof increases at least about 20% (such as at least about any of 30%, 40%, 50%, 60%, 70%, 80%, 90%, 100%, 200%, 300%, 400%, 500%, or more) compared to that in the absence of binding of the antigen-binding protein (e.g., antibody (e.g., full-length antibody), or ligand/receptor-hinge-Fc fusion protein) or antigen binding fragment (e.g., ligand, receptor, VHH, scFv, Fab) to the target antigen; and wherein in the absence of binding of the antigen-binding protein (e.g., antibody (e.g., full-length antibody), or ligand/receptor-hinge-Fc fusion protein) or antigen binding fragment (e.g., ligand, receptor, VHH, scFv, Fab) to the target antigen, the activity (binding affinity to corresponding cytokine receptor or subunit thereof, and/or biological activity) of the cytokine or variant thereof positioned at the hinge region is no more than about 70% (such as no more than about any of 60%, 50%, 40%, 30%, 20%, 10%, 9%, 8%, 7%, 6%, 5%, 4%, 3%, 2%, 1%, 0.9%, 0.8%, 0.7%, 0.6%, 0.5%, 0.4%, 0.3%, 0.2%, 0.1%, or 0%) of that of a corresponding cytokine or variant thereof in a free state. In some embodiments, the antigen-binding protein is an antibody specifically recognizing the target antigen, the antigen-binding polypeptide comprising the hinge region is a heavy chain of the antibody, and the cytokine or variant thereof is positioned at the hinge region of the heavy chain. In some embodiments, the antigen-binding fragment is a ligand, and the target antigen is a receptor specifically recognized by the ligand. In some embodiments, the antigen-binding fragment is a receptor, and the target antigen is a ligand specifically recognized by the receptor. In some embodiments, there is provided an immunocytokine comprising: a) an antibody (e.g., full-length antibody, heavy chain only antibody, or antigen-binding fragment fused to an Fc domain subunit or portion thereof via a hinge region) specifically recognizing a target antigen (e.g., CTLA-4, PD-L1, PD-L2, CD25, HER2, PD-1, CD3, CD4, CD123, or CD8); and b) a cytokine (e.g., IL-2, IFN-α (e.g., IFN-α2b), IFN-γ, IL-10, IL-12, or IL-23) or variant thereof, wherein the antibody comprises a heavy chain comprising a hinge region, wherein the cytokine or variant thereof is positioned at the hinge region (e.g., within the hinge region, between the C-terminus of CH1 and the N-terminus of the hinge region of a heavy chain of the full-length antibody, or between the C-terminus of the antigen-binding fragment and the N-terminus of the hinge region); and wherein in the presence of binding of the antibody (or antigen binding fragment) to the target antigen, the activity (binding affinity to corresponding cytokine receptor or subunit thereof, and/or biological activity) of the cytokine or variant thereof increases at least about 20% (such as at least about any of 30%, 40%, 50%, 60%, 70%, 80%, 90%, 100%, 200%, 300%, 400%, 500%, or more) compared to that in the absence of binding of the antibody (or antigen binding fragment) to the target antigen. In some embodiments, there is provided an immunocytokine comprising: a) an antibody (e.g., full-length antibody, heavy chain only antibody, or antigen-binding fragment fused to an Fc domain subunit or portion thereof via a hinge region) specifically recognizing a target antigen (e.g., CTLA-4, PD-L1, PD-L2, CD25, HER2, PD-1, CD3, CD4, CD123, or CD8); and b) a cytokine (e.g., IL-2, IFN-α (e.g., IFN-α2b), IFN-γ, IL-10, IL-12, or IL-23) or variant thereof, wherein the antibody comprises a heavy chain comprising a hinge region, wherein the cytokine or variant thereof is positioned at the hinge region (e.g., within the hinge region, between the C-terminus of CH1 and the N-terminus of the hinge region of a heavy chain of the full-length antibody, or between the C-terminus of the antigen-binding fragment and the N-terminus of the hinge region); and in the absence of binding of the antibody (or antigen binding fragment) to the target antigen, the activity (binding affinity to corresponding cytokine receptor or subunit thereof, and/or biological activity) of the cytokine or variant thereof positioned at the hinge region is no more than about 70% (such as no more than about any of 60%, 50%, 40%, 30%, 20%, 10%, 9%, 8%, 7%, 6%, 5%, 4%, 3%, 2%, 1%, 0.9%, 0.8%, 0.7%, 0.6%, 0.5%, 0.4%, 0.3%, 0.2%, 0.1%, or 0%) of that of a corresponding cytokine or variant thereof in a free state. In some embodiments, there is provided an immunocytokine comprising: a) an antibody (e.g., full-length antibody, heavy chain only antibody, or antigen-binding fragment fused to an Fc domain subunit or portion thereof via a hinge region) specifically recognizing a target antigen (e.g., CTLA-4, PD-L1, PD-L2, CD25, CD123, HER2, PD-1, CD3, CD4, or CD8); and b) a cytokine (e.g., IL-2, IFN-α (e.g., IFN-α2b), IFN-γ, IL-10, IL-12, or IL-23) or variant thereof, wherein the antibody comprises a heavy chain comprising a hinge region, wherein the cytokine or variant thereof is positioned at the hinge region (e.g., within the hinge region, between the C-terminus of CH1 and the N-terminus of the hinge region of a heavy chain of the full-length antibody, or between the C-terminus of the antigen-binding fragment and the N-terminus of the hinge region); wherein in the presence of binding of the antibody (or antigen binding fragment) to the target antigen, the activity (binding affinity to corresponding cytokine receptor or subunit thereof, and/or biological activity) of the cytokine or variant thereof increases at least about 20% (such as at least about any of 30%, 40%, 50%, 60%, 70%, 80%, 90%, 100%, 200%, 300%, 400%, 500%, or more) compared to that in the absence of binding of the antibody (or antigen binding fragment) to the target antigen; and in the absence of binding of the antibody (or antigen binding fragment) to the target antigen, the activity (binding affinity to corresponding cytokine receptor or subunit thereof, and/or biological activity) of the cytokine or variant thereof positioned at the hinge region is no more than about 70% (such as no more than about any of 60%, 50%, 40%, 30%, 20%, 10%, 9%, 8%, 7%, 6%, 5%, 4%, 3%, 2%, 1%, 0.9%, 0.8%, 0.7%, 0.6%, 0.5%, 0.4%, 0.3%, 0.2%, 0.1%, or 0%) of that of a corresponding cytokine or variant thereof in a free state. In some embodiments, there is provided an immunocytokine comprising: a) a full-length antibody specifically recognizing a target antigen (e.g., CTLA-4, PD-L1, PD-L2, CD25, CD123, HER2, PD-1, CD3, CD4, or CD8); and b) a cytokine (e.g., IL-2, IFN-α (e.g., IFN-α2b), IFN-γ, IL-10, IL-12, or IL-23) or variant thereof, wherein the cytokine or variant thereof is positioned at the hinge region (e.g., within the hinge region, or between the C-terminus of CH1 and the N-terminus of the hinge region) of a heavy chain of the full-length antibody; and wherein in the presence of binding of the full-length antibody to the target antigen, the activity (binding affinity to corresponding cytokine receptor or subunit thereof, and/or biological activity) of the cytokine or variant thereof increases at least about 20% (such as at least about any of 30%, 40%, 50%, 60%, 70%, 80%, 90%, 100%, 200%, 300%, 400%, 500%, or more) compared to that in the absence of binding of the full-length antibody to the target antigen. In some embodiments, there is provided an immunocytokine comprising: a) a full-length antibody specifically recognizing a target antigen (e.g., CTLA-4, PD-L1, PD-L2, CD25, CD123, HER2, PD-1, CD3, CD4, or CD8); and b) a cytokine (e.g., IL-2, IFN-α (e.g., IFN-α2b), IFN-γ, IL-10, IL-12, or IL-23) or variant thereof, wherein the cytokine or variant thereof is positioned at the hinge region (e.g., within the hinge region, or between the C-terminus of CH1 and the N-terminus of the hinge region) of a heavy chain of the full-length antibody; and wherein in the absence of binding of the full-length antibody to the target antigen, the activity (binding affinity to corresponding cytokine receptor or subunit thereof, and/or biological activity) of the cytokine or variant thereof positioned at the hinge region of the heavy chain of the full-length antibody is no more than about 70% (such as no more than about any of 60%, 50%, 40%, 30%, 20%, 10%, 9%, 8%, 7%, 6%, 5%, 4%, 3%, 2%, 1%, 0.9%, 0.8%, 0.7%, 0.6%, 0.5%, 0.4%, 0.3%, 0.2%, 0.1%, or 0%) of that of a corresponding cytokine or variant thereof in a free state. In some embodiments, there is provided an immunocytokine comprising: a) a full-length antibody specifically recognizing a target antigen (e.g., CTLA-4, PD-L1, PD-L2, CD25, CD123, HER2, PD-1, CD3, CD4, or CD8); and b) a cytokine (e.g., IL-2, IFN-α (e.g., IFN-α2b), IFN-γ, IL-10, IL-12, or IL-23) or variant thereof, wherein the cytokine or variant thereof is positioned at the hinge region (e.g., within the hinge region, or between the C-terminus of CH1 and the N-terminus of the hinge region) of a heavy chain of the full-length antibody; wherein in the presence of binding of the full-length antibody to the target antigen, the activity (binding affinity to corresponding cytokine receptor or subunit thereof, and/or biological activity) of the cytokine or variant thereof increases at least about 20% (such as at least about any of 30%, 40%, 50%, 60%, 70%, 80%, 90%, 100%, 200%, 300%, 400%, 500%, or more) compared to that in the absence of binding of the full-length antibody to the target antigen; and wherein in the absence of binding of the full-length antibody to the target antigen, the activity (binding affinity to corresponding cytokine receptor or subunit thereof, and/or biological activity) of the cytokine or variant thereof positioned at the hinge region of the heavy chain of the full-length antibody is no more than about 70% (such as no more than about any of 60%, 50%, 40%, 30%, 20%, 10%, 9%, 8%, 7%, 6%, 5%, 4%, 3%, 2%, %, 0.9%, 0.8%, 0.7%, 0.6%, 0.5%, 0.4%, 0.3%, 0.2%, 0.1%, or 0%) of that of a corresponding cytokine or variant thereof in a free state. In some embodiments, the cytokine or variant thereof is a cytokine variant, and wherein the activity (binding affinity to corresponding cytokine receptor or subunit thereof, and/or biological activity) of the cytokine variant in a free state is no more than about 80% (such as no more than about any of 70%, 60%, 50%, 40%, 30%, 20%, 10%, or 5%) of that of a corresponding wildtype cytokine in a free state. In some embodiments, the antigen-binding protein (e.g., antibody or fragment thereof, or antigen-binding fragment-hinge-Fc fusion protein such as ligand/receptor-hinge-Fc fusion protein) is monospecific. In some embodiments, the antigen-binding protein is multispecific (e.g., bispecific). In some embodiments, the parental antigen-binding protein (e.g., antibody such as full-length antibody, or antigen-binding fragment-hinge-Fc fusion protein such as ligand/receptor-hinge-Fc fusion protein) is homodimeric. In some embodiments, the parental antigen-binding protein is heterodimeric. In some embodiments, the antigen-binding protein is an agonist. In some embodiments, the antigen-binding protein is an antagonist.

[0121] In some embodiments, there is provided an immunocytokine comprising: a) an antigen-binding protein (e.g., antibody such as full-length antibody, or antigen-binding fragment-hinge-Fc fusion protein such as ligand/receptor-hinge-Fc fusion protein) specifically recognizing a target antigen (e.g., CTLA-4, PD-L1, PD-L2, CD25, HER2, PD-1, CD3, CD4, CD123, or CD8); b) a first cytokine (e.g., IL-2, IFN-α (e.g., IFN-α2b), IFN-γ, IL-10, IL-12, or IL-23) or variant thereof, and c) a second cytokine (e.g., IL-2, IFN-α (e.g., IFN-α2b), IFN-γ, IL-10, IL-12, or IL-23) or variant thereof, wherein the antigen-binding protein comprises two antigen-binding polypeptides (e.g., antibody heavy chain, or antigen-binding fragment-hinge-Fc fusion polypeptide such as ligand/receptor-hinge-Fc fusion polypeptide) each comprising from N′ to C′: an antigen-binding fragment (e.g., ligand, receptor, VHH, scFv, or VH), a hinge region, and an Fc domain subunit or portion thereof (e.g., CH2+CH3, or CH2 only), wherein the first cytokine or variant thereof is positioned at (e.g., at the N′ of, at the C′ of, or within) the hinge region of the first antigen-binding polypeptide, and wherein the second cytokine or variant thereof is positioned at (e.g., at the N′ of, at the C′ of, or within) the hinge region of the second antigen-binding polypeptide. In some embodiments, the antigen-binding protein is an antibody specifically recognizing the target antigen, the antigen-binding polypeptide comprising the hinge region is a heavy chain of the antibody, and the cytokine or variant thereof is positioned at the hinge region of the heavy chain.

[0122] In some embodiments, the antigen-binding fragment is a ligand, and the target antigen is a receptor specifically recognized by the ligand. In some embodiments, the antigen-binding fragment is a receptor, and the target antigen is a ligand specifically recognized by the receptor. In some embodiments, there is provided an immunocytokine comprising: a) an antibody (e.g., full-length antibody, heavy chain only antibody, or antigen-binding fragment fused to an Fc domain subunit or portion thereof via a hinge region) specifically recognizing a target antigen (e.g., CTLA-4, PD-L1, PD-L2, CD25, HER2, PD-1, CD3, CD4, CD123, or CD8); b) a first cytokine (e.g., IL-2, IFN-α (e.g., IFN-α2b), IFN-γ, IL-10, IL-12, or IL-23) or variant thereof, and c) a second cytokine (e.g., IL-2, IFN-α (e.g., IFN-α2b), IFN-γ, IL-10, IL-12, or IL-23) or variant thereof, wherein the antibody comprises two heavy chains each comprising a hinge region, wherein the first cytokine or variant thereof is positioned at the hinge region (e.g., within the hinge region, or between the C-terminus of CH1 and the N-terminus of the hinge region) of a first heavy chain of the antibody, and wherein the second cytokine or variant thereof is positioned at the hinge region (e.g., within the hinge region, or between the C-terminus of CH1 and the N-terminus of the hinge region) of a second heavy chain of the antibody. In some embodiments, there is provided an immunocytokine comprising: a) an antibody specifically recognizing a target antigen (e.g., CTLA-4, PD-L1, PD-L2, CD25, HER2, PD-1, CD3, CD4, CD123, or CD8); b) a first cytokine (e.g., IL-2, IFN-α (e.g., IFN-α2b), IFN-γ, IL-10, IL-12, or IL-23) or variant thereof, and c) a second cytokine (e.g., IL-2, IFN-α (e.g., IFN-α2b), IFN-γ, IL-10, IL-12, or IL-23) or variant thereof, wherein the antibody comprises two heavy chains, wherein the first heavy chain comprises from N-terminus to C-terminus: a VH domain, optionally a CH1 domain, the first cytokine or variant thereof at a first hinge region, a CH2 domain, and optionally a CH3 domain; and wherein the second heavy chain comprises from N-terminus to C-terminus: a VH domain, optionally a CH1 domain, the second cytokine or variant thereof at a second hinge region, a CH2 domain, and optionally a CH3 domain. In some embodiments, there is provided an immunocytokine comprising: a) a full-length antibody specifically recognizing a target antigen (e.g., CTLA-4, PD-L1, PD-L2, CD25, HER2, PD-1, CD3, CD4, CD123, or CD8); b) a first cytokine (e.g., IL-2, IFN-α (e.g., IFN-α2b), IFN-γ, IL-10, IL-12, or IL-23) or variant thereof, and c) a second cytokine (e.g., IL-2, IFN-α (e.g., IFN-α2b), IFN-γ, IL-10, IL-12, or IL-23) or variant thereof, wherein the first cytokine or variant thereof is positioned at the hinge region (e.g., within the hinge region, or between the C-terminus of CH1 and the N-terminus of the hinge region) of a first heavy chain of the full-length antibody, and wherein the second cytokine or variant thereof is positioned at the hinge region (e.g., within the hinge region, or between the C-terminus of CH1 and the N-terminus of the hinge region) of a second heavy chain of the full-length antibody. In some embodiments, the antigen-binding protein (e.g., antibody or fragment thereof, or antigen-binding fragment-hinge-Fc fusion protein such as ligand/receptor-hinge-Fc fusion protein) is monospecific. In some embodiments, the antigen-binding protein is multispecific (e.g., bispecific). In some embodiments, the parental antigen-binding protein (e.g., antibody such as full-length antibody, or antigen-binding fragment-hinge-Fc fusion protein such as ligand/receptor-hinge-Fc fusion protein) is homodimeric. In some embodiments, the parental antigen-binding protein is heterodimeric. In some embodiments, the first heavy chain and a first light chain of the antibody forms a first antigen-binding fragment (e.g., the first Fab) specifically recognizing a first target antigen, and the second heavy chain and a second light chain of the antibody forms a second antigen-binding fragment (e.g., the second Fab) specifically recognizing a second target antigen. In some embodiments, in the presence of binding of the antigen-binding protein (e.g., antibody such as full-length antibody, or ligand/receptor-hinge-Fc fusion protein) or antigen-binding fragment (e.g., ligand, receptor, VHH, scFv, Fab) to the target antigen (e.g., binding of the first antigen-binding fragment such as Fab or ligand to the first target antigen, and/or binding of the second antigen-binding fragment such as such as Fab or ligand to the second target antigen), the activity (binding affinity to corresponding cytokine receptor or subunit thereof, and/or biological activity) of the first and/or second cytokine or variant thereof increases at least about 20% (such as at least about any of 30%, 40%, 50%, 60%, 70%, 80%, 90%, 100%, 200%, 300%, 400%, 500%, or more) compared to that in the absence of binding of the antigen-binding protein (e.g., antibody such as full-length antibody, or ligand/receptor-hinge-Fc fusion protein) or antigen binding fragment (e.g., ligand, receptor, VHH, scFv, Fab) to the target antigen (neither antigen-binding fragment such as Fab or ligand binds to the target antigen). In some embodiments, in the absence of binding of the antigen-binding protein (e.g., antibody such as full-length antibody, or ligand/receptor-hinge-Fc fusion protein) or antigen binding fragment (e.g., ligand, receptor, VHH, scFv, Fab) to the target antigen (e.g., neither antigen-binding fragment such as Fab or ligand binds to the target antigen), the activity (binding affinity to corresponding cytokine receptor or subunit thereof, and/or biological activity) of the first and/or second cytokine or variant thereof positioned at the hinge region of each antigen-binding polypeptide (e.g., antibody heavy chain, or antigen-binding fragment-hinge-Fc polypeptide) is no more than about 70% (such as no more than about any of 60%, 50%, 40%, 30%, 20%, 10%, 9%, 8%, 7%, 6%, 5%, 4%, 3%, 2%, 1%, 0.9%, 0.8%, 0.7%, 0.6%, 0.5%, 0.4%, 0.3%, 0.2%, 0.1%, or 0%) of that of a corresponding first and/or second cytokine or variant thereof in a free state. In some embodiments, the first and/or second cytokine or variant thereof is a cytokine variant, and wherein the activity (binding affinity to corresponding cytokine receptor or subunit thereof, and/or biological activity) of the cytokine variant in a free state is no more than about 80% (such as no more than about any of 70%, 60%, 50%, 40%, 30%, 20%, 10%, or 5%) of that of a corresponding wildtype cytokine in a free state. In some embodiments, the two cytokines or variants thereof are the same. In some embodiments, the two cytokines or variants thereof are different. In some embodiments, the first cytokine or variant thereof is IL-2 or variant thereof (e.g., SEQ ID NO: 2). In some embodiments, the second cytokine or variant thereof is IL-12 or variant thereof (e.g., SEQ ID NO: 36). In some embodiments, the antigen-binding protein is an agonist. In some embodiments, the antigen-binding protein is an antagonist.

[0123] In some embodiments, there is provided an immunocytokine comprising: a) an antigen-binding protein (e.g., antibody such as full-length antibody, or antigen-binding fragment-hinge-Fc fusion protein such as ligand/receptor-hinge-Fc fusion protein) specifically recognizing a target antigen (e.g., CTLA-4, PD-L1, PD-L2, CD25, HER2, PD-1, CD3, CD4, CD123, or CD8); b) a first cytokine (e.g., IL-2, IFN-α (e.g., IFN-α2b), IFN-γ, IL-10, IL-12, or IL-23) or variant thereof, and c) a second cytokine (e.g., IL-2, IFN-α (e.g., IFN-α2b), IFN-γ, IL-10, IL-12, or IL-23) or variant thereof, wherein the antigen-binding protein comprises a antigen-binding polypeptide (e.g., antibody heavy chain, or antigen-binding fragment-hinge-Fc fusion polypeptide such as ligand/receptor-hinge-Fc fusion polypeptide) comprising from N′ to C′: an antigen-binding fragment (e.g., ligand, receptor, VHH, scFv, or VH), a hinge region, and an Fc domain subunit or portion thereof (e.g., CH2+CH3, or CH2 only), an wherein the first cytokine or variant thereof and the second cytokine or variant thereof are positioned in tandem (e.g., connected via an optional peptide linker) at the hinge region (e.g., within the hinge region, or between the C-terminus of CH1 and the N-terminus of the hinge region) of the antigen-binding polypeptide. In some embodiments, the antigen-binding protein is an antibody specifically recognizing the target antigen, the antigen-binding polypeptide comprising the hinge region is a heavy chain of the antibody, and the cytokine or variant thereof is positioned at the hinge region of the heavy chain.

[0124] In some embodiments, the antigen-binding fragment is a ligand, and the target antigen is a receptor specifically recognized by the ligand. In some embodiments, the antigen-binding fragment is a receptor, and the target antigen is a ligand specifically recognized by the receptor. In some embodiments, there is provided an immunocytokine comprising: a) an antibody (e.g., full-length antibody, heavy chain only antibody, or antigen-binding fragment fused to an Fc domain subunit or portion thereof via a hinge region) specifically recognizing a target antigen (e.g., CTLA-4, PD-L1, PD-L2, CD25, HER2, PD-1, CD3, CD4, CD123, or CD8); b) a first cytokine (e.g., IL-2, IFN-α (e.g., IFN-α2b), IFN-γ, IL-10, IL-12, or IL-23) or variant thereof, and c) a second cytokine (e.g., IL-2, IFN-α (e.g., IFN-α2b), IFN-γ, IL-10, IL-12, or IL-23) or variant thereof, wherein the antibody comprises a heavy chain comprising a hinge region, and wherein the first cytokine or variant thereof and the second cytokine or variant thereof are positioned in tandem (e.g., connected via an optional peptide linker) at the hinge region (e.g., within the hinge region, or between the C-terminus of CH1 and the N-terminus of the hinge region) of the heavy chain. In some embodiments, there is provided an immunocytokine comprising: a) an antibody (e.g., full-length antibody, heavy chain only antibody, or antigen-binding fragment fused to an Fc domain subunit or portion thereof via a hinge region) specifically recognizing a target antigen (e.g., CTLA-4, PD-L1, PD-L2, CD25, HER2, PD-1, CD3, CD4, CD123, or CD8); b) a first cytokine (e.g., IL-2, IFN-α (e.g., IFN-α2b), IFN-γ, IL-10, IL-12, or IL-23) or variant thereof, and c) a second cytokine (e.g., IL-2, IFN-α (e.g., IFN-α2b), IFN-γ, IL-10, IL-12, or IL-23) or variant thereof, and wherein the antibody comprises a heavy chain comprising from N-terminus to C-terminus: a VH domain, optionally a CH1 domain, the first cytokine or variant thereof at the hinge region, optionally a linker (e.g., peptide linker), the second cytokine or variant thereof, a CH2 domain, and optionally a CH3 domain. In some embodiments, there is provided an immunocytokine comprising: a) a full-length antibody specifically recognizing a target antigen (e.g., CTLA-4, PD-L1, PD-L2, CD25, HER2, PD-1, CD3, CD4, CD123, or CD8); b) a first cytokine (e.g., IL-2, IFN-α (e.g., IFN-α2b), IFN-γ, IL-10, IL-12, or IL-23) or variant thereof, and c) a second cytokine (e.g., IL-2, IFN-α (e.g., IFN-α2b), IFN-γ, IL-10, IL-12, or IL-23) or variant thereof, wherein the first cytokine or variant thereof and the second cytokine or variant thereof are positioned in tandem (e.g., connected via an optional peptide linker) at the hinge region (e.g., within the hinge region, or between the C-terminus of CH1 and the N-terminus of the hinge region) of a heavy chain of the full-length antibody. In some embodiments, in the presence of binding of the antigen-binding protein (e.g., antibody such as full-length antibody, or ligand/receptor-hinge-Fc fusion protein) or antigen binding fragment (e.g., ligand, receptor, VHH, scFv, Fab) to the target antigen, the activity (binding affinity to corresponding cytokine receptor or subunit thereof, and/or biological activity) of the first and second cytokines or variants thereof increases at least about 20% (such as at least about any of 30%, 40%, 50%, 60%, 70%, 80%, 90%, 100%, 200%, 300%, 400%, 500%, or more) compared to that in the absence of binding of the antigen-binding protein (e.g., antibody such as full-length antibody, or ligand/receptor-hinge-Fc fusion protein) or antigen binding fragment (e.g., ligand, receptor, VHH, scFv, Fab) to the target antigen. In some embodiments, in the absence of binding of the antigen-binding protein (e.g., antibody such as full-length antibody, or ligand/receptor-hinge-Fc fusion protein) or antigen binding fragment (e.g., ligand, receptor, VHH, scFv, Fab) to the target antigen, the activity (binding affinity to corresponding cytokine receptor or subunit thereof, and/or biological activity) of the first and second cytokines or variants thereof positioned at the hinge region of the antigen-binding polypeptide (e.g., antibody heavy chain, or antigen-binding fragment-hinge-Fc fusion protein) is no more than about 70% (such as no more than about any of 60%, 50%, 40%, 30%, 20%, 10%, 9%, 8%, 7%, 6%, 5%, 4%, 3%, 2%, 1%, 0.9%, 0.8%, 0.7%, 0.6%, 0.5%, 0.4%, 0.3%, 0.2%, 0.1%, or 0%) of that of corresponding first and second cytokines or variants thereof in a free state. In some embodiments, the first and/or second cytokine or variant thereof is a cytokine variant, and wherein the activity (binding affinity to corresponding cytokine receptor or subunit thereof, and/or biological activity) of the cytokine variant in a free state is no more than about 80% (such as no more than about any of 70%, 60%, 50%, 40%, 30%, 20%, 10%, or 5%) of that of a corresponding wildtype cytokine in a free state. In some embodiments, the antigen-binding protein (e.g., antibody or fragment thereof, or antigen-binding fragment-hinge-Fc fusion protein such as ligand/receptor-hinge-Fc fusion protein) is monospecific. In some embodiments, the antigen-binding protein is multispecific (e.g., bispecific).

[0125] In some embodiments, the parental antigen-binding protein (e.g., antibody such as full-length antibody, or antigen-binding fragment-hinge-Fc fusion protein such as ligand/receptor-hinge-Fc fusion protein) is homodimeric. In some embodiments, the parental antigen-binding protein is heterodimeric. In some embodiments, the two cytokines or variants thereof are the same. In some embodiments, the two cytokines or variants thereof are different. In some embodiments, the first cytokine or variant thereof is IL-2 or variant thereof (e.g., SEQ ID NO: 2). In some embodiments, the second cytokine or variant thereof is IL-12 or variant thereof (e.g., SEQ ID NO: 36). In some embodiments, the antigen-binding protein is an agonist. In some embodiments, the antigen-binding protein is an antagonist.

[0126] In some embodiments, the cytokine or variant thereof is a dimeric cytokine or variant thereof. In some embodiments, the cytokine or variant thereof is a homodimeric cytokine or variant thereof, such as IL-10 or IFN-γ. In some embodiments, the cytokine or variant thereof is a heterodimeric cytokine or variant thereof, such as IL-12 or IL-23. In some embodiments, there is provided an immunocytokine comprising: a) an antigen-binding protein (e.g., antibody such as full-length antibody, or antigen-binding fragment-hinge-Fc fusion protein such as ligand/receptor-hinge-Fc fusion protein) specifically recognizing a target antigen (e.g., CTLA-4, PD-L1, PD-L2, CD25, HER2, PD-1, CD3, CD4, CD123, or CD8); and b) a dimeric cytokine (e.g., IFN-γ, IL-10, IL-12, or IL-23) or variant thereof, wherein the antigen-binding protein comprises an antigen-binding polypeptide (e.g., antibody heavy chain, or antigen-binding fragment-hinge-Fc fusion polypeptide such as ligand/receptor-hinge-Fc fusion polypeptide) comprising from N′ to C′: an antigen-binding fragment (e.g., ligand, receptor, VHH, scFv, or VH), a hinge region, and an Fc domain subunit or portion thereof (e.g., CH2+CH3, or CH2 only), and wherein both subunits of the dimeric cytokine or variant thereof are positioned in tandem (e.g., connected via an optional peptide linker such as any of SEQ ID NOs: 227-229) at (e.g., at the N′ of, at the C′ of, or within) the hinge region of the antigen-binding polypeptide. In some embodiments, the antigen-binding protein is an antibody specifically recognizing the target antigen, the antigen-binding polypeptide comprising the hinge region is a heavy chain of the antibody, and the cytokine or variant thereof is positioned at the hinge region of the heavy chain. In some embodiments, the antigen-binding fragment is a ligand, and the target antigen is a receptor specifically recognized by the ligand. In some embodiments, the antigen-binding fragment is a receptor, and the target antigen is a ligand specifically recognized by the receptor. In some embodiments, there is provided an immunocytokine comprising: a) an antibody (e.g., full-length antibody, heavy chain only antibody, or antigen-binding fragment fused to an Fc domain subunit or portion thereof via a hinge region) specifically recognizing a target antigen (e.g., CTLA-4, PD-L1, PD-L2, CD25, HER2, PD-1, CD3, CD4, CD123, or CD8); and b) a dimeric cytokine (e.g., IFN-γ, IL-10, IL-12, or IL-23) or variant thereof, wherein the antibody comprises a heavy chain comprising a hinge region, and wherein both subunits of the dimeric cytokine or variant thereof are positioned in tandem (e.g., connected via an optional peptide linker such as any of SEQ ID NOs: 227-229) at the hinge region (e.g., within the hinge region, or between the C-terminus of CH1 and the N-terminus of the hinge region) of the heavy chain. In some embodiments, there is provided an immunocytokine comprising: a) an antibody specifically recognizing a target antigen (e.g., CTLA-4, PD-L1, PD-L2, CD25, HER2, PD-1, CD3, CD4, CD123, or CD8); and b) a dimeric cytokine (e.g., IFN-γ, IL-10, IL-12, or IL-23) or variant thereof, and wherein the antibody comprises a heavy chain comprising from N-terminus to C-terminus: a VH domain, optionally a CH1 domain, [a first subunit of the dimeric cytokine or variant thereof, optionally a linker (e.g., peptide linker), a second subunit of the dimeric cytokine or variant thereof] at a hinge region, a CH2 domain, and optionally a CH3 domain. In some embodiments, there is provided an immunocytokine comprising: a) a full-length antibody specifically recognizing a target antigen (e.g., CTLA-4, PD-L1, PD-L2, CD25, HER2, PD-1, CD3, CD4, CD123, or CD8); and b) a dimeric cytokine (e.g., IFN-γ, IL-10, IL-12, or IL-23) or variant thereof, wherein both subunits of the dimeric cytokine or variant thereof are positioned in tandem (e.g., connected via an optional peptide linker such as any of SEQ ID NOs: 227-229) at the hinge region (e.g., within the hinge region, or between the C-terminus of CH1 and the N-terminus of the hinge region) of a heavy chain of the full-length antibody. In some embodiments, in the presence of binding of the antigen-binding protein (e.g., antibody such as full-length antibody, or ligand/receptor-hinge-Fc fusion protein) or antigen binding fragment (e.g., ligand, receptor, VHH, scFv, Fab) to the target antigen, the activity (binding affinity to corresponding cytokine receptor or subunit thereof, and/or biological activity) of the dimeric cytokine or variant thereof increases at least about 20% (such as at least about any of 30%, 40%, 50%, 60%, 70%, 80%, 90%, 100%, 200%, 300%, 400%, 500%, or more) compared to that in the absence of binding of the antigen-binding protein (e.g., antibody such as full-length antibody, or ligand/receptor-hinge-Fc fusion protein) or antigen binding fragment (e.g., ligand, receptor, VHH, scFv, Fab) to the target antigen. In some embodiments, in the absence of binding of the antigen-binding protein (e.g., antibody such as full-length antibody, or ligand/receptor-hinge-Fc fusion protein) or antigen-binding fragment (e.g., ligand, receptor, VHH, scFv, Fab) to the target antigen, the activity (binding affinity to corresponding cytokine receptor or subunit thereof, and/or biological activity) of the dimeric cytokine or variant thereof positioned at the hinge region of the antigen-binding polypeptide (e.g., antibody heavy chain, or antigen-binding fragment-hinge-Fc fusion polypeptide) is no more than about 70% (such as no more than about any of 60%, 50%, 40%, 30%, 20%, 10%, 9%, 8%, 7%, 6%, 5%, 4%, 3%, 2%, 1%, 0.9%, 0.8%, 0.7%, 0.6%, 0.5%, 0.4%, 0.3%, 0.2%, 0.1%, or 0%) of that of a corresponding dimeric cytokine or variant thereof in a free state. In some embodiments, the dimeric cytokine or variant thereof is a dimeric cytokine variant, and the activity (binding affinity to corresponding cytokine receptor or subunit thereof, and/or biological activity) of the dimeric cytokine variant in a free state is no more than about 80% (such as no more than about any of 70%, 60%, 50%, 40%, 30%, 20%, 10%, or 5%) of that of a corresponding wildtype dimeric cytokine in a free state. In some embodiments, the antigen-binding protein (e.g., antibody or fragment thereof, or antigen-binding fragment-hinge-Fc fusion protein such as ligand/receptor-hinge-Fc fusion protein) is monospecific. In some embodiments, the antigen-binding protein is multispecific (e.g., bispecific). In some embodiments, the parental antigen-binding protein (e.g., antibody such as full-length antibody, or antigen-binding fragment-hinge-Fc fusion protein such as ligand/receptor-hinge-Fc fusion protein) is homodimeric. In some embodiments, the parental antigen-binding protein is heterodimeric. In some embodiments, the cytokine or variant thereof is a homodimeric cytokine or variant thereof, such as IL-10 or IFN-γ. In some embodiments, the cytokine or variant thereof is a heterodimeric cytokine or variant thereof, such as IL-12 or IL-23. In some embodiments, the antigen-binding protein is an agonist. In some embodiments, the antigen-binding protein is an antagonist.

[0127] In some embodiments, there is provided an immunocytokine comprising: a) an antigen-binding protein (e.g., antibody such as full-length antibody, or antigen-binding fragment-hinge-Fc fusion protein such as ligand/receptor-hinge-Fc fusion protein) specifically recognizing a target antigen (e.g., CTLA-4, PD-L1, PD-L2, CD25, HER2, PD-1, CD3, CD4, CD123, or CD8); and b) a dimeric cytokine (e.g., IFN-γ, IL-10, IL-12, or IL-23) or variant thereof, wherein the antigen-binding protein comprises two antigen-binding polypeptides (e.g., antibody heavy chain, or antigen-binding fragment-hinge-Fc fusion polypeptide such as ligand/receptor-hinge-Fc fusion polypeptide) each comprising from N′ to C′: an antigen-binding fragment (e.g., ligand, receptor, VHH, scFv, or VH), a hinge region, and an Fc domain subunit or portion thereof (e.g., CH2+CH3, or CH2 only); wherein one subunit of the dimeric cytokine or variant thereof is positioned at (e.g., at the N′ of, at the C′ of, or within) the hinge region of the first antigen-binding polypeptide, and the other subunit of the dimeric cytokine or variant thereof is positioned at (e.g., at the N′ of, at the C′ of, or within) the hinge region of the second antigen-binding polypeptide. In some embodiments, the antigen-binding protein is an antibody specifically recognizing the target antigen, the antigen-binding polypeptide comprising the hinge region is a heavy chain of the antibody, and the cytokine or variant thereof is positioned at the hinge region of the heavy chain.

[0128] In some embodiments, the antigen-binding fragment is a ligand, and the target antigen is a receptor specifically recognized by the ligand. In some embodiments, the antigen-binding fragment is a receptor, and the target antigen is a ligand specifically recognized by the receptor. In some embodiments, there is provided an immunocytokine comprising: a) an antibody (e.g., full-length antibody, heavy chain only antibody, or antigen-binding fragment fused to an Fc domain subunit or portion thereof via a hinge region) specifically recognizing a target antigen (e.g., CTLA-4, PD-L1, PD-L2, CD25, HER2, PD-1, CD3, CD4, CD123, or CD8); and b) a dimeric cytokine (e.g., IFN-γ, IL-10, IL-12, or IL-23) or variant thereof, wherein the antibody comprises two heavy chains each comprising a hinge region, wherein one subunit of the dimeric cytokine or variant thereof is positioned at the hinge region (e.g., within the hinge region, or between the C-terminus of CH1 and the N-terminus of the hinge region) of the first heavy chain, and the other subunit of the dimeric cytokine or variant thereof is positioned at the hinge region (e.g., within the hinge region, or between the C-terminus of CH1 and the N-terminus of the hinge region) of the second heavy chain. In some embodiments, there is provided an immunocytokine comprising: a) an antibody specifically recognizing a target antigen (e.g., CTLA-4, PD-L1, PD-L2, CD25, HER2, PD-1, CD3, CD4, CD123, or CD8); and b) a dimeric cytokine (e.g., IFN-γ, IL-10, IL-12, or IL-23) or variant thereof, wherein the antibody comprises two heavy chains, wherein the first heavy chain comprises from N-terminus to C-terminus: a VH domain, optionally a CH1 domain, a first subunit of the dimeric cytokine or variant thereof at a first hinge region, a CH2 domain, and optionally a CH3 domain, and wherein the second heavy chain comprises from N-terminus to C-terminus: a V_{H} domain, optionally a C_{H}1 domain, a second subunit of the dimeric cytokine or variant thereof at a second hinge region, a CH2 domain, and optionally a CH3 domain. In some embodiments, there is provided an immunocytokine comprising: a) a full-length antibody specifically recognizing a target antigen (e.g., CTLA-4, PD-L1, PD-L2, CD25, HER2, PD-1, CD3, CD4, CD123, or CD8); and b) a dimeric cytokine (e.g., IFN-γ, IL-10, IL-12, or IL-23) or variant thereof, wherein one subunit of the dimeric cytokine or variant thereof is positioned at the hinge region (e.g., within the hinge region, or between the C-terminus of CH1 and the N-terminus of the hinge region) of a first heavy chain of the full-length antibody, and the other subunit of the dimeric cytokine or variant thereof is positioned at the hinge region (e.g., between the C-terminus of CH1 and the N-terminus of the hinge region) of a second heavy chain of the full-length antibody. In some embodiments, the antigen-binding protein (e.g., antibody or fragment thereof, or antigen-binding fragment-hinge-Fc fusion protein such as ligand/receptor-hinge-Fc fusion protein) is monospecific. In some embodiments, the antigen-binding protein is multispecific (e.g., bispecific). In some embodiments, the parental antigen-binding protein (e.g., antibody such as full-length antibody, or antigen-binding fragment-hinge-Fc fusion protein such as ligand/receptor-hinge-Fc fusion protein) is homodimeric. In some embodiments, the parental antigen-binding protein is heterodimeric. In some embodiments, the first heavy chain and a first light chain of the antibody forms a first antigen-binding fragment (e.g., the first Fab) specifically recognizing a first target antigen, and the second heavy chain and a second light chain of the antibody forms a second antigen-binding fragment (e.g., the second Fab) specifically recognizing a second target antigen. In some embodiments, in the presence of binding of the antigen-binding protein (e.g., antibody such as full-length antibody, or ligand/receptor-hinge-Fc fusion protein) or antigen-binding fragment (e.g., ligand, receptor, VHH, scFv, Fab) to the target antigen (e.g., binding of the first antigen-binding fragment such as Fab or ligand to the first target antigen, and/or binding of the second antigen-binding fragment such as Fab or ligand to the second target antigen), the activity (binding affinity to corresponding cytokine receptor or subunit thereof, and/or biological activity) of the dimeric cytokine or variant thereof increases at least about 20% (such as at least about any of 30%, 40%, 50%, 60%, 70%, 80%, 90%, 100%, 200%, 300%, 400%, 500%, or more) compared to that in the absence of binding of the antigen-binding protein (e.g., antibody such as full-length antibody, or ligand/receptor-hinge-Fc fusion protein) or antigen-binding fragment (e.g., ligand, receptor, VHH, scFv, Fab) to the target antigen (e.g., neither antigen-binding fragment such as Fab or ligand binds to the target antigen). In some embodiments, in the absence of binding of the antigen-binding protein (e.g., antibody such as full-length antibody, or ligand/receptor-hinge-Fc fusion protein) or antigen-binding fragment (e.g., ligand, receptor, VHH, scFv, Fab) to the target antigen (e.g., neither antigen-binding fragment such as Fab or ligand binds to the target antigen), the activity (binding affinity to corresponding cytokine receptor or subunit thereof, and/or biological activity) of the dimeric cytokine or variant thereof with each subunit positioned at the hinge region of each antigen-binding polypeptide (e.g., antibody heavy chain, or antigen-binding fragment-hinge-Fc polypeptide) is no more than about 70% (such as no more than about any of 60%, 50%, 40%, 30%, 20%, 10%, 9%, 8%, 7%, 6%, 5%, 4%, 3%, 2%, 1%, 0.9%, 0.8%, 0.7%, 0.6%, 0.5%, 0.4%, 0.3%, 0.2%, 0.1%, or 0%) of that of a corresponding dimeric cytokine or variant thereof in a free state.

[0129] In some embodiments, the dimeric cytokine or variant thereof is a cytokine variant, and wherein the activity (binding affinity to corresponding cytokine receptor or subunit thereof, and/or biological activity) of the dimeric cytokine variant in a free state is no more than about 80% (such as no more than about any of 70%, 60%, 50%, 40%, 30%, 20%, 10%, or 5%) of that of a corresponding wildtype dimeric cytokine in a free state. In some embodiments, the cytokine or variant thereof is a homodimeric cytokine or variant thereof, such as IL-10 or IFN-γ. In some embodiments, the cytokine or variant thereof is a heterodimeric cytokine or variant thereof, such as IL-12 or IL-23. In some embodiments, the antigen-binding protein (e.g., antibody or fragment thereof, or antigen-binding fragment-hinge-Fc fusion protein such as ligand/receptor-hinge-Fc fusion protein) is monospecific. In some embodiments, the antigen-binding protein is multispecific (e.g., bispecific). In some embodiments, the parental antigen-binding protein (e.g., antibody such as full-length antibody, or antigen-binding fragment-hinge-Fc fusion protein such as ligand/receptor-hinge-Fc fusion protein) is homodimeric. In some embodiments, the parental antigen-binding protein is heterodimeric. In some embodiments, the antigen-binding protein is an agonist. In some embodiments, the antigen-binding protein is an antagonist.

[0130] In some embodiments, the cytokine or variant thereof is IL-2 or variant thereof. In some embodiments, there is provided an IL-2 immunocytokine comprising: a) an antigen-binding protein (e.g., antibody such as full-length antibody, or antigen-binding fragment-hinge-Fc fusion protein such as ligand/receptor-hinge-Fc fusion protein) specifically recognizing a target antigen (e.g., CTLA-4, PD-L1, PD-L2, CD25, HER2, PD-1, CD3, CD4, CD123, or CD8); and b) an IL-2 or variant thereof (e.g., SEQ ID NO: 1 or 2), wherein the antigen-binding protein comprises an antigen-binding polypeptide (e.g., antibody heavy chain, or antigen-binding fragment-hinge-Fc fusion polypeptide such as ligand/receptor-hinge-Fc fusion polypeptide) comprising from N′ to C′: an antigen-binding fragment (e.g., ligand such as PD-L2 extracellular domain, receptor, VHH, scFv, or VH), a hinge region, and an Fc domain subunit or portion thereof (e.g., CH2+CH3, or CH2 only), and wherein the IL-2 or variant thereof is positioned at (e.g., at the N′ of, at the C′ of, or within) the hinge region. In some embodiments, the antigen-binding protein is an antibody (e.g., full-length antibody) specifically recognizing the target antigen, the antigen-binding polypeptide comprising the hinge region is a heavy chain of the antibody, and the IL-2 or variant thereof is positioned at the hinge region of the heavy chain. In some embodiments, the antigen-binding fragment is a ligand, and the target antigen is a receptor specifically recognized by the ligand. In some embodiments, the antigen-binding fragment is a receptor, and the target antigen is a ligand specifically recognized by the receptor. In some embodiments, there is provided an IL-2 immunocytokine comprising: a) an antibody (e.g., full-length antibody, heavy chain only antibody, or antigen-binding fragment fused to an Fc domain subunit or portion thereof via a hinge region) specifically recognizing a target antigen (e.g., CTLA-4, PD-L1, PD-L2, CD25, HER2, PD-1, CD3, CD4, CD123, or CD8); and b) an IL-2 or variant thereof (e.g., SEQ ID NO: 1 or 2), wherein the antibody comprises a heavy chain comprising a hinge region, and wherein the IL-2 or variant thereof is positioned at the hinge region (e.g., within the hinge region, or between the C-terminus of CH1 and the N-terminus of the hinge region) of the heavy chain. In some embodiments, there is provided an IL-2 immunocytokine comprising: a) an antibody specifically recognizing a target antigen (e.g., CTLA-4, PD-L1, PD-L2, CD25, HER2, PD-1, CD3, CD4, CD123, or CD8); and b) an anti-IL-2 or variant thereof (e.g., SEQ ID NO: 1 or 2), wherein the antibody comprises a heavy chain, and wherein the heavy chain comprises from N-terminus to C-terminus: a VH domain, optionally a CH1 domain, the IL-2 or variant thereof at a hinge region, a CH2 domain, and optionally a CH3 domain. In some embodiments, there is provided an IL-2 immunocytokine comprising: a) a full-length antibody specifically recognizing a target antigen (e.g., CTLA-4, PD-L1, PD-L2, CD25, HER2, PD-1, CD3, CD4, CD123, or CD8); and b) an IL-2 or variant thereof (e.g., SEQ ID NO: 1 or 2), wherein the IL-2 or variant thereof is positioned at the hinge region (e.g., within the hinge region, or between the C-terminus of CH1 and the N-terminus of the hinge region) of a heavy chain of the full-length antibody. In some embodiments, there is provided an IL-2 immunocytokine comprising: a) a full-length antibody specifically recognizing a target antigen (e.g., CTLA-4, PD-L1, PD-L2, CD25, HER2, PD-1, CD3, CD4, CD123, or CD8); and b) an IL-2 variant comprising one or more mutations at a position selected from the group consisting of L18, Q22, F24, K35, R38, F42, K43, E61, and P65 relative to a wildtype IL-2 comprising the sequence of SEQ ID NO: 1, wherein the IL-2 variant is positioned at the hinge region (e.g., within the hinge region, or between the C-terminus of CH1 and the N-terminus of the hinge region) of a heavy chain of the full-length antibody. In some embodiments, there is provided an IL-2 immunocytokine comprising: a) a full-length antibody specifically recognizing a target antigen (e.g., CTLA-4, PD-L1, PD-L2, CD25, HER2, PD-1, CD3, CD4, CD123, or CD8); and b) an IL-2 variant comprising one or more mutations selected from the group consisting of F24A, R38D, K43E, E61R, and P65L relative to a wildtype IL-2 comprising the sequence of SEQ ID NO: 1, wherein the IL-2 variant is positioned at the hinge region (e.g., within the hinge region, or between the C-terminus of CH1 and the N-terminus of the hinge region) of a heavy chain of the full-length antibody. In some embodiments, there is provided an IL-2 immunocytokine comprising: a) a full-length antibody specifically recognizing a target antigen (e.g., CTLA-4, PD-L1, PD-L2, CD25, HER2, PD-1, CD3, CD4, CD123, or CD8); and b) an IL-2 variant comprising an R38D/K43E/E61R mutation relative to a wildtype IL-2 comprising the sequence of SEQ ID NO: 1, wherein the IL-2 variant is positioned at the hinge region (e.g., within the hinge region, or between the C-terminus of CH1 and the N-terminus of the hinge region) of a heavy chain of the full-length antibody. In some embodiments, there is provided an IL-2 immunocytokine comprising: a) a full-length antibody specifically recognizing a target antigen (e.g., CTLA-4, PD-L1, PD-L2, CD25, HER2, PD-1, CD3, CD4, CD123, or CD8); and b) an IL-2 variant comprising the sequence of SEQ ID NO: 2, wherein the IL-2 variant is positioned at the hinge region (e.g., within the hinge region, or between the C-terminus of CH1 and the N-terminus of the hinge region) of a heavy chain of the full-length antibody. In some embodiments, the activity (binding affinity to corresponding cytokine receptor or subunit thereof, and/or biological activity) of the IL-2 variant in a free state is no more than about 80% (such as no more than about any of 70%, 60%, 50%, 40%, 30%, 20%, 10%, or 5%) of that of a corresponding wildtype IL-2 in a free state. In some embodiments, the antigen-binding protein (e.g., antibody or fragment thereof, or antigen-binding fragment-hinge-Fc fusion protein such as ligand/receptor-hinge-Fc fusion protein) is monospecific. In some embodiments, the antigen-binding protein is multispecific (e.g., bispecific).

[0131] In some embodiments, the parental antigen-binding protein (e.g., antibody such as full-length antibody, or antigen-binding fragment-hinge-Fc fusion protein such as ligand/receptor-hinge-Fc fusion protein) is homodimeric. In some embodiments, the parental antigen-binding protein is heterodimeric. In some embodiments, the antigen-binding protein is an agonist. In some embodiments, the antigen-binding protein is an antagonist. In some embodiments, the hinge region comprises the sequence of any of SEQ ID NOs: 40-47, 50-52, and 55-59.

[0132] In some embodiments, the antigen-binding protein is an anti-HER2 antibody. Thus in some embodiments, there is provided an IL-2 immunocytokine (“IL-2/anti-HER2 immunocytokine”) comprising: a) an antibody (e.g., full-length antibody, heavy chain only antibody, or antigen-binding fragment fused to an Fc domain subunit or portion thereof) specifically recognizing HER2; and b) an IL-2 or variant thereof (e.g., SEQ ID NO: 1 or 2), wherein the antibody comprises a heavy chain comprising a hinge region (e.g., any of SEQ ID NOs: 40-47, 50-52, and 55-59), and wherein the IL-2 or variant thereof is positioned at the hinge region (e.g., within the hinge region, or between the C-terminus of CH1 and the N-terminus of the hinge region) of the heavy chain. In some embodiments, there is provided an IL-2/anti-HER2 immunocytokine comprising: a) a full-length antibody specifically recognizing HER2; and b) an IL-2 or variant thereof (e.g., SEQ ID NO: 1 or 2), wherein the IL-2 or variant thereof is positioned at the hinge region (e.g., any of SEQ ID NOs: 40-47, 50-52, and 55-59)(e.g., within the hinge region, or between the C-terminus of CH1 and the N-terminus of the hinge region) of a heavy chain of the full-length antibody; and wherein the anti-HER2 antibody comprises: i) a VH-CDR1 comprising the sequence of SEQ ID NO: 188; ii) a VH-CDR2 comprising the sequence of SEQ ID NO: 189; iii) a VH-CDR3 comprising the sequence of SEQ ID NO: 190; iv) a VL-CDR1 comprising the sequence of SEQ ID NO: 191; v) a VL-CDR2 comprising the sequence of SEQ ID NO: 192; and vi) a VL-CDR3 comprising the sequence of SEQ ID NO: 193. In some embodiments, the anti-HER2 antibody or antigen binding fragment thereof comprises a VH comprising the sequence of SEQ ID NO: 150 and a VL comprising the sequence of SEQ ID NO: 151. In some embodiments, the parental anti-HER2 antibody comprises two heavy chains each comprising the sequence of SEQ ID NO: 152 or 153, and two light chains each comprising the sequence of SEQ ID NO: 154. In some embodiments, the IL-2 variant comprises the sequence of SEQ ID NO: 2. In some embodiments, the heavy chain comprising the IL-2 variant positioned at the hinge region comprises the sequence of SEQ ID NO: 156. In some embodiments, there is provided an IL-2/anti-HER2 immunocytokine comprising: two light chains comprising the sequence of SEQ ID NO: 154, one heavy chain comprising an IL-2 variant positioned at the hinge region comprising the sequence of SEQ ID NO: 156, and one heavy chain comprises the sequence of SEQ ID NO: 155. In some embodiments, in the presence of binding of the antibody (or antigen-binding fragment) to HER2, the activity (binding affinity to corresponding cytokine receptor or subunit thereof, and/or biological activity) of the IL-2 cytokine or variant thereof increases at least about 20% (such as at least about any of 30%, 40%, 50%, 60%, 70%, 80%, 90%, 100%, 200%, 300%, 400%, 500%, or more) compared to that in the absence of binding of the antibody (or antigen-binding fragment) to HER2. In some embodiments, in the absence of binding of the antibody (or antigen-binding fragment) to HER2, the activity (binding affinity to corresponding cytokine receptor or subunit thereof, and/or biological activity) of the IL-2 cytokine or variant thereof positioned at the hinge region of the heavy chain is no more than about 70% (such as no more than about any of 60%, 50%, 40%, 30%, 20%, 10%, 9%, 8%, 7%, 6%, 5%, 4%, 3%, 2%, 1%, 0.9%, 0.8%, 0.7%, 0.6%, 0.5%, 0.4%, 0.3%, 0.2%, 0.1%, or 0%) of that of a corresponding IL-2 cytokine or variant thereof in a free state. In some embodiments, the antibody is monospecific. In some embodiments, the antibody is multispecific (e.g., bispecific). In some embodiments, the antibody is homodimeric. In some embodiments, the antibody is heterodimeric. In some embodiments, the antibody is an agonist antibody. In some embodiments, the antibody is an antagonist antibody.

[0133] In some embodiments, the antigen-binding protein is an anti-CD3 antibody. Thus in some embodiments, there is provided an IL-2 immunocytokine (“IL-2/anti-CD3 immunocytokine”) comprising: a) an antibody (e.g., full-length antibody, heavy chain only antibody, or antigen-binding fragment fused to an Fc domain subunit or portion thereof) specifically recognizing CD3; and b) an IL-2 or variant thereof (e.g., SEQ ID NO: 1 or 2), wherein the antibody comprises a heavy chain comprising a hinge region (e.g., any of SEQ ID NOs: 40-47, 50-52, and 55-59), and wherein the IL-2 or variant thereof is positioned at the hinge region (e.g., within the hinge region, or between the C-terminus of CH1 and the N-terminus of the hinge region) of the heavy chain. In some embodiments, there is provided an IL-2/anti-CD3 immunocytokine comprising: a) a full-length antibody specifically recognizing CD3; and b) an IL-2 or variant thereof (e.g., SEQ ID NO: 1 or 2), wherein the IL-2 or variant thereof is positioned at the hinge region (e.g., any of SEQ ID NOs: 40-47, 50-52, and 55-59)(e.g., within the hinge region, or between the C-terminus of CH1 and the N-terminus of the hinge region) of a heavy chain of the full-length antibody; and wherein the anti-CD3 antibody comprises: i) a VH-CDR1 comprising the sequence of SEQ ID NO: 85; ii) a VH-CDR2 comprising the sequence of SEQ ID NO: 86; iii) a VH-CDR3 comprising the sequence of SEQ ID NO: 87; iv) a VL-CDR1 comprising the sequence of SEQ ID NO: 88; v) a VL-CDR2 comprising the sequence of SEQ ID NO: 89; and vi) a VL-CDR3 comprising the sequence of SEQ ID NO: 90. In some embodiments, the anti-CD3 antibody comprises a VH comprising the sequence of SEQ ID NO: 91 and a VL comprising the sequence of SEQ ID NO: 92. In some embodiments, the parental anti-CD3 antibody comprises two heavy chains each comprising the sequence of SEQ ID NO: 93, and two light chains each comprising the sequence of SEQ ID NO: 94. In some embodiments, the IL-2 variant comprises the sequence of SEQ ID NO: 2. In some embodiments, the heavy chain comprising the IL-2 variant positioned at the hinge region comprises the sequence of SEQ ID NO: 96. In some embodiments, there is provided an IL-2/anti-CD3 immunocytokine comprising: two light chains comprising the sequence of SEQ ID NO: 94, one heavy chain comprising an IL-2 variant positioned at the hinge region comprising the sequence of SEQ ID NO: 96, and one heavy chain comprises the sequence of SEQ ID NO: 95. In some embodiments, in the presence of binding of the antibody (or antigen-binding fragment) to CD3, the activity (binding affinity to corresponding cytokine receptor or subunit thereof, and/or biological activity) of the IL-2 cytokine or variant thereof increases at least about 20% (such as at least about any of 30%, 40%, 50%, 60%, 70%, 80%, 90%, 100%, 200%, 300%, 400%, 500%, or more) compared to that in the absence of binding of the antibody (or antigen-binding fragment) to CD3. In some embodiments, in the absence of binding of the antibody (or antigen-binding fragment) to CD3, the activity (binding affinity to corresponding cytokine receptor or subunit thereof, and/or biological activity) of the IL-2 cytokine or variant thereof positioned at the hinge region of the heavy chain is no more than about 70% (such as no more than about any of 60%, 50%, 40%, 30%, 20%, 10%, 9%, 8%, 7%, 6%, 5%, 4%, 3%, 2%, 1%, 0.9%, 0.8%, 0.7%, 0.6%, 0.5%, 0.4%, 0.3%, 0.2%, 0.1%, or 0%) of that of a corresponding IL-2 cytokine or variant thereof in a free state. In some embodiments, the antibody is monospecific. In some embodiments, the antibody is multispecific (e.g., bispecific). In some embodiments, the antibody is homodimeric. In some embodiments, the antibody is heterodimeric. In some embodiments, the antibody is an agonist antibody. In some embodiments, the antibody is an antagonist antibody.

[0134] In some embodiments, the antigen-binding protein is an anti-PD-1 antibody. Thus in some embodiments, there is provided an IL-2 immunocytokine (“IL-2/anti-PD-1 immunocytokine”) comprising: a) an antibody (e.g., full-length antibody, heavy chain only antibody, or antigen-binding fragment fused to an Fc domain subunit or portion thereof) specifically recognizing PD-1; and b) an IL-2 or variant thereof (e.g., SEQ ID NO: 1 or 2), wherein the antibody comprises a heavy chain comprising a hinge region (e.g., any of SEQ ID NOs: 40-47, 50-52, and 55-59), and wherein the IL-2 or variant thereof is positioned at the hinge region (e.g., any of SEQ ID NOs: 40-47, 50-52, and 55-59)(e.g., within the hinge region, or between the C-terminus of CH1 and the N-terminus of the hinge region) of the heavy chain. In some embodiments, there is provided an IL-2/anti-PD-1 immunocytokine comprising: a) a full-length antibody specifically recognizing PD-1; and b) an IL-2 or variant thereof (e.g., SEQ ID NO: 1 or 2), wherein the IL-2 or variant thereof is positioned at the hinge region (e.g., within the hinge region, or between the C-terminus of CH1 and the N-terminus of the hinge region) of a heavy chain of the full-length antibody; and wherein the anti-PD-1 antibody comprises VH-CDR1, VH-CDR2, and VH-CDR3 of a VH comprising the sequence of SEQ ID NO: 102, and VL-CDR1, VL-CDR2, and VL-CDR3 of a VL comprising the sequence of SEQ ID NO: 103. In some embodiments, the anti-PD-1 antibody comprises a VH comprising the sequence of SEQ ID NO: 102 and a VL comprising the sequence of SEQ ID NO: 103. In some embodiments, the parental anti-PD-1 antibody comprises two heavy chains each comprising the sequence of SEQ ID NO: 104 or 105, and two light chains each comprising the sequence of SEQ ID NO: 106. In some embodiments, the IL-2 variant comprises the sequence of SEQ ID NO: 2. In some embodiments, the heavy chain comprising the IL-2 variant positioned at the hinge region comprises the sequence of SEQ ID NO: 108. In some embodiments, there is provided an IL-2/anti-PD-1 immunocytokine comprising: two light chains comprising the sequence of SEQ ID NO: 106, one heavy chain comprising an IL-2 variant positioned at the hinge region comprising the sequence of SEQ ID NO: 108, and one heavy chain comprises the sequence of SEQ ID NO: 107. In some embodiments, in the presence of binding of the antibody (or antigen-binding fragment) to PD-1, the activity (binding affinity to corresponding cytokine receptor or subunit thereof, and/or biological activity) of the IL-2 cytokine or variant thereof increases at least about 20% (such as at least about any of 30%, 40%, 50%, 60%, 70%, 80%, 90%, 100%, 200%, 300%, 400%, 500%, or more) compared to that in the absence of binding of the antibody (or antigen-binding fragment) to PD-1. In some embodiments, in the absence of binding of the antibody (or antigen-binding fragment) to PD-1, the activity (binding affinity to corresponding cytokine receptor or subunit thereof, and/or biological activity) of the IL-2 cytokine or variant thereof positioned at the hinge region of the heavy chain is no more than about 70% (such as no more than about any of 60%, 50%, 40%, 30%, 20%, 10%, 9%, 8%, 7%, 6%, 5%, 4%, 3%, 2%, 1%, 0.9%, 0.8%, 0.7%, 0.6%, 0.5%, 0.4%, 0.3%, 0.2%, 0.1%, or 0%) of that of a corresponding IL-2 cytokine or variant thereof in a free state. In some embodiments, the antibody is monospecific. In some embodiments, the antibody is multispecific (e.g., bispecific).

[0135] In some embodiments, the antibody is homodimeric. In some embodiments, the antibody is heterodimeric. In some embodiments, the antibody is an agonist antibody. In some embodiments, the antibody is an antagonist antibody.

[0136] In some embodiments, the antigen-binding protein is an anti-CD4 antibody. Thus in some embodiments, there is provided an IL-2 immunocytokine (“IL-2/anti-CD4 immunocytokine”) comprising: a) an antibody (e.g., full-length antibody, heavy chain only antibody, or antigen-binding fragment fused to an Fc domain subunit or portion thereof) specifically recognizing CD4; and b) an IL-2 or variant thereof (e.g., SEQ ID NO: 1 or 2), wherein the antibody comprises a heavy chain comprising a hinge region (e.g., any of SEQ ID NOs: 40-47, 50-52, and 55-59), and wherein the IL-2 or variant thereof is positioned at the hinge region (e.g., within the hinge region, or between the C-terminus of CH1 and the N-terminus of the hinge region) of the heavy chain. In some embodiments, there is provided an IL-2/anti-CD4 immunocytokine comprising: a) a full-length antibody specifically recognizing CD4; and b) an IL-2 or variant thereof (e.g., SEQ ID NO: 1 or 2), wherein the IL-2 or variant thereof is positioned at the hinge region (e.g., any of SEQ ID NOs: 40-47, 50-52, and 55-59)(e.g., within the hinge region, or between the C-terminus of CH1 and the N-terminus of the hinge region) of a heavy chain of the full-length antibody; and wherein the anti-CD4 antibody comprises: i) a VH-CDR1 comprising the sequence of SEQ ID NO: 67; ii) a VH-CDR2 comprising the sequence of SEQ ID NO: 68; iii) a VH-CDR3 comprising the sequence of SEQ ID NO: 69; iv) a VL-CDR1 comprising the sequence of SEQ ID NO: 70; v) a VL-CDR2 comprising the sequence of SEQ ID NO: 71; and vi) a VL-CDR3 comprising the sequence of SEQ ID NO: 72. In some embodiments, the anti-CD4 antibody comprises a VH comprising the sequence of SEQ ID NO: 73 and a VL comprising the sequence of SEQ ID NO: 74. In some embodiments, the parental anti-CD4 antibody comprises two heavy chains each comprising the sequence of SEQ ID NO: 75 or 76, and two light chains each comprising the sequence of SEQ ID NO: 77. In some embodiments, the IL-2 variant comprises the sequence of SEQ ID NO: 2. In some embodiments, the heavy chain comprising the IL-2 variant positioned at the hinge region comprises the sequence of SEQ ID NO: 79. In some embodiments, there is provided an IL-2/anti-CD4 immunocytokine comprising: two light chains comprising the sequence of SEQ ID NO: 77, one heavy chain comprising an IL-2 variant positioned at the hinge region comprising the sequence of SEQ ID NO: 79, and one heavy chain comprises the sequence of SEQ ID NO: 78. In some embodiments, in the presence of binding of the antibody (or antigen-binding fragment) to CD4, the activity (binding affinity to corresponding cytokine receptor or subunit thereof, and/or biological activity) of the IL-2 cytokine or variant thereof increases at least about 20% (such as at least about any of 30%, 40%, 50%, 60%, 70%, 80%, 90%, 100%, 200%, 300%, 400%, 500%, or more) compared to that in the absence of binding of the antibody (or antigen-binding fragment) to CD4. In some embodiments, in the absence of binding of the antibody (or antigen-binding fragment) to CD4, the activity (binding affinity to corresponding cytokine receptor or subunit thereof, and/or biological activity) of the IL-2 cytokine or variant thereof positioned at the hinge region of the heavy chain is no more than about 70% (such as no more than about any of 60%, 50%, 40%, 30%, 20%, 10%, 9%, 8%, 7%, 6%, 5%, 4%, 3%, 2%, 1%, 0.9%, 0.8%, 0.7%, 0.6%, 0.5%, 0.4%, 0.3%, 0.2%, 0.1%, or 0%) of that of a corresponding IL-2 cytokine or variant thereof in a free state. In some embodiments, the antibody is monospecific. In some embodiments, the antibody is multispecific (e.g., bispecific). In some embodiments, the antibody is homodimeric. In some embodiments, the antibody is heterodimeric. In some embodiments, the antibody is an agonist antibody. In some embodiments, the antibody is an antagonist antibody.

[0137] In some embodiments, the antigen-binding protein is an anti-CD8 antibody. Thus in some embodiments, there is provided an IL-2 immunocytokine (“IL-2/anti-CD8 immunocytokine”) comprising: a) an antibody (e.g., full-length antibody, heavy chain only antibody, or antigen-binding fragment fused to an Fc domain subunit or portion thereof) specifically recognizing CD8; and b) an IL-2 or variant thereof (e.g., SEQ ID NO: 1 or 2), wherein the antibody comprises a heavy chain comprising a hinge region (e.g., any of SEQ ID NOs: 40-47, 50-52, and 55-59), and wherein the IL-2 or variant thereof is positioned at the hinge region (e.g., within the hinge region, or between the C-terminus of CH1 and the N-terminus of the hinge region) of the heavy chain. In some embodiments, there is provided an IL-2/anti-CD8 immunocytokine comprising: a) a full-length antibody specifically recognizing CD8; and b) an IL-2 or variant thereof (e.g., SEQ ID NO: 1 or 2), wherein the IL-2 or variant thereof is positioned at the hinge region (e.g., any of SEQ ID NOs: 40-47, 50-52, and 55-59)(e.g., within the hinge region, between the C-terminus of CH1 and the N-terminus of the hinge region) of a heavy chain of the full-length antibody; and wherein the anti-CD8 antibody comprises VH-CDR1, VH-CDR2, and VH-CDR3 of a VH comprising the sequence of SEQ ID NO: 114, and VL-CDR1, VL-CDR2, and VL-CDR3 of a VL comprising the sequence of SEQ ID NO: 115. In some embodiments, the anti-CD8 antibody comprises a VH comprising the sequence of SEQ ID NO: 114 and a VL comprising the sequence of SEQ ID NO: 115. In some embodiments, the parental anti-CD8 antibody comprises two heavy chains each comprising the sequence of SEQ ID NO: 116, and two light chains each comprising the sequence of SEQ ID NO: 117. In some embodiments, the IL-2 variant comprises the sequence of SEQ ID NO: 2. In some embodiments, the heavy chain comprising the IL-2 variant positioned at the hinge region comprises the sequence of SEQ ID NO: 119. In some embodiments, there is provided an IL-2/anti-CD8 immunocytokine comprising: two light chains comprising the sequence of SEQ ID NO: 117, one heavy chain comprising an IL-2 variant positioned at the hinge region comprising the sequence of SEQ ID NO: 119, and one heavy chain comprises the sequence of SEQ ID NO: 118. In some embodiments, in the presence of binding of the antibody (or antigen-binding fragment) to CD8, the activity (binding affinity to corresponding cytokine receptor or subunit thereof, and/or biological activity) of the IL-2 cytokine or variant thereof increases at least about 20% (such as at least about any of 30%, 40%, 50%, 60%, 70%, 80%, 90%, 100%, 200%, 300%, 400%, 500%, or more) compared to that in the absence of binding of the antibody (or antigen-binding fragment) to CD8. In some embodiments, in the absence of binding of the antibody (or antigen-binding fragment) to CD8, the activity (binding affinity to corresponding cytokine receptor or subunit thereof, and/or biological activity) of the IL-2 cytokine or variant thereof positioned at the hinge region of the heavy chain is no more than about 70% (such as no more than about any of 60%, 50%, 40%, 30%, 20%, 10%, 9%, 8%, 7%, 6%, 5%, 4%, 3%, 2%, 1%, 0.9%, 0.8%, 0.7%, 0.6%, 0.5%, 0.4%, 0.3%, 0.2%, 0.1%, or 0%) of that of a corresponding IL-2 cytokine or variant thereof in a free state. In some embodiments, the antibody is monospecific. In some embodiments, the antibody is multispecific (e.g., bispecific). In some embodiments, the antibody is homodimeric. In some embodiments, the antibody is heterodimeric. In some embodiments, the antibody is an agonist antibody. In some embodiments, the antibody is an antagonist antibody.

[0138] In some embodiments, the antigen-binding protein is an anti-CTLA-4 antibody. Thus in some embodiments, there is provided an IL-2 immunocytokine (“IL-2/anti-CTLA-4 immunocytokine”) comprising: a) an antibody (e.g., full-length antibody, heavy chain only antibody, or antigen-binding fragment fused to an Fc domain subunit or portion thereof) specifically recognizing CTLA-4; and b) an IL-2 or variant thereof (e.g., SEQ ID NO: 1 or 2), wherein the antibody comprises a heavy chain comprising a hinge region (e.g., any of SEQ ID NOs: 40-47, 50-52, and 55-59), and wherein the IL-2 or variant thereof is positioned at the hinge region (e.g., within the hinge region, or between the C-terminus of CH1 and the N-terminus of the hinge region) of the heavy chain. In some embodiments, there is provided an IL-2/anti-CTLA-4 immunocytokine comprising: a) a full-length antibody specifically recognizing CTLA-4; and b) an IL-2 or variant thereof (e.g., SEQ ID NO: 1 or 2), wherein the IL-2 or variant thereof is positioned at the hinge region (e.g., any of SEQ ID NOs: 40-47, 50-52, and 55-59)(e.g., within the hinge region, between the C-terminus of CH1 and the N-terminus of the hinge region) of a heavy chain of the full-length antibody; and wherein the anti-CTLA-4 antibody comprises VH-CDR1, VH-CDR2, and VH-CDR3 of a VH comprising the sequence of SEQ ID NO: 125, and VL-CDR1, VL-CDR2, and VL-CDR3 of a VL comprising the sequence of SEQ ID NO: 126. In some embodiments, the anti-CTLA-4 antibody comprises a VH comprising the sequence of SEQ ID NO: 125 and a VL comprising the sequence of SEQ ID NO: 126. In some embodiments, the parental anti-CTLA-4 antibody comprises two heavy chains each comprising the sequence of SEQ ID NO: 127 or 128, and two light chains each comprising the sequence of SEQ ID NO: 129. In some embodiments, the IL-2 variant comprises the sequence of SEQ ID NO: 2. In some embodiments, the heavy chain comprising the IL-2 variant positioned at the hinge region comprises the sequence of SEQ ID NO: 131. In some embodiments, there is provided an IL-2/anti-CTLA-4 immunocytokine comprising: two light chains comprising the sequence of SEQ ID NO: 129, one heavy chain comprising an IL-2 variant positioned at the hinge region comprising the sequence of SEQ ID NO: 131, and one heavy chain comprises the sequence of SEQ ID NO: 130.

[0139] In some embodiments, in the presence of binding of the antibody (or antigen-binding fragment) to CTLA-4, the activity (binding affinity to corresponding cytokine receptor or subunit thereof, and/or biological activity) of the IL-2 cytokine or variant thereof increases at least about 20% (such as at least about any of 30%, 40%, 50%, 60%, 70%, 80%, 90%, 100%, 200%, 300%, 400%, 500%, or more) compared to that in the absence of binding of the antibody (or antigen-binding fragment) to CTLA-4. In some embodiments, in the absence of binding of the antibody (or antigen-binding fragment) to CTLA-4, the activity (binding affinity to corresponding cytokine receptor or subunit thereof, and/or biological activity) of the IL-2 cytokine or variant thereof positioned at the hinge region of the heavy chain is no more than about 70% (such as no more than about any of 60%, 50%, 40%, 30%, 20%, 10%, 9%, 8%, 7%, 6%, 5%, 4%, 3%, 2%, 1%, 0.9%, 0.8%, 0.7%, 0.6%, 0.5%, 0.4%, 0.3%, 0.2%, 0.1%, or 0%) of that of a corresponding IL-2 cytokine or variant thereof in a free state. In some embodiments, the antibody is monospecific. In some embodiments, the antibody is multispecific (e.g., bispecific). In some embodiments, the antibody is homodimeric. In some embodiments, the antibody is heterodimeric. In some embodiments, the antibody is an agonist antibody. In some embodiments, the antibody is an antagonist antibody.

[0140] In some embodiments, the antigen-binding protein is an anti-PD-L1 antibody. Thus in some embodiments, there is provided an IL-2 immunocytokine (“IL-2/anti-PD-L1 immunocytokine”) comprising: a) an antibody (e.g., full-length antibody, heavy chain only antibody, or antigen-binding fragment fused to an Fc domain subunit or portion thereof) specifically recognizing PD-L1; and b) an IL-2 or variant thereof (e.g., SEQ ID NO: 1 or 2), wherein the antibody comprises a heavy chain comprising a hinge region (e.g., any of SEQ ID NOs: 40-47, 50-52, and 55-59), and wherein the IL-2 or variant thereof is positioned at the hinge region (e.g., within the hinge region, between the C-terminus of CH1 and the N-terminus of the hinge region) of the heavy chain. In some embodiments, there is provided an IL-2/anti-PD-L1 immunocytokine comprising: a) a full-length antibody specifically recognizing PD-L1; and b) an IL-2 or variant thereof (e.g., SEQ ID NO: 1 or 2), wherein the IL-2 or variant thereof is positioned at the hinge region (e.g., any of SEQ ID NOs: 40-47, 50-52, and 55-59)(e.g., within the hinge region, between the C-terminus of CH1 and the N-terminus of the hinge region) of a heavy chain of the full-length antibody; and wherein the anti-PD-L1 antibody comprises: i) a VH-CDR1 comprising the sequence of SEQ ID NO: 243; ii) a VH-CDR2 comprising the sequence of SEQ ID NO: 244; iii) a VH-CDR3 comprising the sequence of SEQ ID NO: 245; iv) a VL-CDR1 comprising the sequence of SEQ ID NO: 246; v) a VL-CDR2 comprising the sequence of SEQ ID NO: 247; and vi) a VL-CDR3 comprising the sequence of SEQ ID NO: 248. In some embodiments, the anti-PD-L1 antibody comprises a VH comprising the sequence of SEQ ID NO: 137 and a VL comprising the sequence of SEQ ID NO: 138. In some embodiments, the parental anti-PD-L1 antibody comprises two heavy chains each comprising the sequence of SEQ ID NO: 139, and two light chains each comprising the sequence of SEQ ID NO: 140. In some embodiments, the parental anti-PD-L1 antibody comprises two heavy chains each comprising the sequence of SEQ ID NO: 141, and two light chains each comprising the sequence of SEQ ID NO: 142. In some embodiments, the IL-2 variant comprises the sequence of SEQ ID NO: 2. In some embodiments, the heavy chain comprising the IL-2 variant positioned at the hinge region comprises the sequence of SEQ ID NO: 144. In some embodiments, there is provided an IL-2/anti-PD-L1 immunocytokine comprising: two light chains comprising the sequence of SEQ ID NO: 140, one heavy chain comprising an IL-2 variant positioned at the hinge region comprising the sequence of SEQ ID NO: 144, and one heavy chain comprises the sequence of SEQ ID NO: 143. In some embodiments, in the presence of binding of the antibody (or antigen-binding fragment) to PD-L1, the activity (binding affinity to corresponding cytokine receptor or subunit thereof, and/or biological activity) of the IL-2 cytokine or variant thereof increases at least about 20% (such as at least about any of 30%, 40%, 50%, 60%, 70%, 80%, 90%, 100%, 200%, 300%, 400%, 500%, or more) compared to that in the absence of binding of the antibody (or antigen-binding fragment) to PD-L1. In some embodiments, in the absence of binding of the antibody (or antigen-binding fragment) to PD-L1, the activity (binding affinity to corresponding cytokine receptor or subunit thereof, and/or biological activity) of the IL-2 cytokine or variant thereof positioned at the hinge region of the heavy chain is no more than about 70% (such as no more than about any of 60%, 50%, 40%, 30%, 20%, 10%, 9%, 8%, 7%, 6%, 5%, 4%, 3%, 2%, 1%, 0.9%, 0.8%, 0.7%, 0.6%, 0.5%, 0.4%, 0.3%, 0.2%, 0.1%, or 0%) of that of a corresponding IL-2 cytokine or variant thereof in a free state. In some embodiments, the antibody is monospecific. In some embodiments, the antibody is multispecific (e.g., bispecific). In some embodiments, the antibody is homodimeric. In some embodiments, the antibody is heterodimeric.

[0141] In some embodiments, the antigen-binding protein is an anti-CD25 antibody. Thus in some embodiments, there is provided an IL-2 immunocytokine (“IL-2/anti-CD25 immunocytokine”) comprising: a) an antibody (e.g., full-length antibody, heavy chain only antibody, or antigen-binding fragment fused to an Fc domain subunit or portion thereof) specifically recognizing CD25; and b) an IL-2 or variant thereof (e.g., SEQ ID NO: 1 or 2), wherein the antibody comprises a heavy chain comprising a hinge region (e.g., any of SEQ ID NOs: 40-47, 50-52, and 55-59), and wherein the IL-2 or variant thereof is positioned at the hinge region (e.g., within the hinge region, or between the C-terminus of CH1 and the N-terminus of the hinge region) of the heavy chain. In some embodiments, there is provided an IL-2/anti-CD25 immunocytokine comprising: a) a full-length antibody specifically recognizing CD25; and b) an IL-2 or variant thereof (e.g., SEQ ID NO: 1 or 2), wherein the IL-2 or variant thereof is positioned at the hinge region (e.g., any of SEQ ID NOs: 40-47, 50-52, and 55-59)(e.g., within the hinge region, between the C-terminus of CH1 and the N-terminus of the hinge region) of a heavy chain of the full-length antibody; and wherein the anti-CD25 antibody comprises VH-CDR1, VH-CDR2, and VH-CDR3 of a VH comprising the sequence of SEQ ID NO: 162, and VL-CDR1, VL-CDR2, and VL-CDR3 of a VL comprising the sequence of SEQ ID NO: 163. In some embodiments, the anti-CD25 antibody comprises a VH comprising the sequence of SEQ ID NO: 162 and a VL comprising the sequence of SEQ ID NO: 163. In some embodiments, the parental anti-CD25 antibody comprises two heavy chains each comprising the sequence of SEQ ID NO: 164, and two light chains each comprising the sequence of SEQ ID NO: 165. In some embodiments, the parental anti-CD25 antibody comprises two heavy chains each comprising the sequence of SEQ ID NO: 166, and two light chains each comprising the sequence of SEQ ID NO: 167. In some embodiments, the IL-2 variant comprises the sequence of SEQ ID NO: 2. In some embodiments, the heavy chain comprising the IL-2 variant positioned at the hinge region comprises the sequence of SEQ ID NO: 169. In some embodiments, there is provided an IL-2/anti-CD25 immunocytokine comprising: two light chains comprising the sequence of SEQ ID NO: 165, one heavy chain comprising an IL-2 variant positioned at the hinge region comprising the sequence of SEQ ID NO: 169, and one heavy chain comprises the sequence of SEQ ID NO: 168. In some embodiments, in the presence of binding of the antibody (or antigen-binding fragment) to CD25, the activity (binding affinity to corresponding cytokine receptor or subunit thereof, and/or biological activity) of the IL-2 cytokine or variant thereof increases at least about 20% (such as at least about any of 30%, 40%, 50%, 60%, 70%, 80%, 90%, 100%, 200%, 300%, 400%, 500%, or more) compared to that in the absence of binding of the antibody (or antigen-binding fragment) to CD25. In some embodiments, in the absence of binding of the antibody (or antigen-binding fragment) to CD25, the activity (binding affinity to corresponding cytokine receptor or subunit thereof, and/or biological activity) of the IL-2 cytokine or variant thereof positioned at the hinge region of the heavy chain is no more than about 70% (such as no more than about any of 60%, 50%, 40%, 30%, 20%, 10%, 9%, 8%, 7%, 6%, 5%, 4%, 3%, 2%, 1%, 0.9%, 0.8%, 0.7%, 0.6%, 0.5%, 0.4%, 0.3%, 0.2%, 0.1%, or 0%) of that of a corresponding IL-2 cytokine or variant thereof in a free state. In some embodiments, the antibody is monospecific. In some embodiments, the antibody is multispecific (e.g., bispecific). In some embodiments, the antibody is homodimeric. In some embodiments, the antibody is heterodimeric. In some embodiments, the antibody is an agonist antibody. In some embodiments, the antibody is an antagonist antibody.

[0142] In some embodiments, the antigen-binding protein is a PD-L2 (e.g., PD-L2 extracellular domain)-hinge-Fc fusion protein. Thus in some embodiments, there is provided an IL-2 immunocytokine (“IL-2/PD-L2-Fc immunocytokine”) comprising: a) a PD-L2-hinge-Fc fusion polypeptide comprising from N′ to C′: a PD-L2 (e.g., SEQ ID NO: 176) specifically recognizing PD-1, a hinge region, and an Fc domain subunit or portion thereof; and b) an IL-2 or variant thereof (e.g., SEQ ID NO: 1 or 2), and wherein the IL-2 or variant thereof is positioned at the hinge region (e.g., any of SEQ ID NOs: 40-47, 50-52, and 55-59)(e.g., within the hinge region, or between the C-terminus of PD-L2 and the N-terminus of the hinge region) of the PD-L2-hinge-Fc fusion polypeptide. In some embodiments, the parental PD-L2-hinge-Fc fusion protein comprises two PD-L2-hinge-Fc fusion polypeptides each comprising the sequence of SEQ ID NO: 177. In some embodiments, the IL-2 variant comprises the sequence of SEQ ID NO: 2. In some embodiments, the PD-L2-hinge-Fc fusion polypeptide comprising the IL-2 variant positioned at the hinge region comprises the sequence of SEQ ID NO: 180. In some embodiments, there is provided an IL-2/PD-L2-Fc immunocytokine comprising: a PD-L2-hinge-Fc fusion polypeptide comprising an IL-2 variant positioned at the hinge region comprises the sequence of SEQ ID NO: 180, and a PD-L2-hinge-Fc fusion polypeptide comprises the sequence of SEQ ID NO: 179. In some embodiments, in the presence of binding of the PD-L2 ligand to PD-1, the activity (binding affinity to corresponding cytokine receptor or subunit thereof, and/or biological activity) of the IL-2 cytokine or variant thereof increases at least about 20% (such as at least about any of 30%, 40%, 50%, 60%, 70%, 80%, 90%, 100%, 200%, 300%, 400%, 500%, or more) compared to that in the absence of binding of the PD-L2 ligand to PD-1. In some embodiments, in the absence of binding of the PD-L2 ligand to PD-1, the activity (binding affinity to corresponding cytokine receptor or subunit thereof, and/or biological activity) of the IL-2 cytokine or variant thereof positioned at the hinge region is no more than about 70% (such as no more than about any of 60%, 50%, 40%, 30%, 20%, 10%, 9%, 8%, 7%, 6%, 5%, 4%, 3%, 2%, 1%, 0.9%, 0.8%, 0.7%, 0.6%, 0.5%, 0.4%, 0.3%, 0.2%, 0.1%, or 0%) of that of a corresponding IL-2 cytokine or variant thereof in a free state. In some embodiments, the PD-L2-hinge-Fc fusion protein is monospecific. In some embodiments, the PD-L2-hinge-Fc fusion protein is multispecific (e.g., bispecific). In some embodiments, the PD-L2-hinge-Fc fusion protein is homodimeric. In some embodiments, the PD-L2-hinge-Fc fusion protein is heterodimeric. In some embodiments, the PD-L2 moiety is an agonist that can stimulate or enhance PD-1 signaling. In some embodiments, the PD-L2 moiety is an antagonist that can reduce or block PD-1 signaling.

[0143] In some embodiments, the cytokine or variant thereof is IFN-α (e.g., IFN-α2b) or variant thereof. In some embodiments, there is provided an IFN-α (e.g., IFN-α2b) immunocytokine comprising: a) an antigen-binding protein (e.g., antibody such as full-length antibody, or antigen-binding fragment-hinge-Fc fusion protein such as ligand/receptor-hinge-Fc fusion protein) specifically recognizing a target antigen (e.g., CTLA-4, PD-L1, PD-L2, CD25, HER2, PD-1, CD3, CD4, CD123, or CD8); and b) an IFN-α (e.g., IFN-α2b) or variant thereof (e.g., any of SEQ ID NOs: 3-9), wherein the antigen-binding protein comprises an antigen-binding polypeptide (e.g., antibody heavy chain, or antigen-binding fragment-hinge-Fc fusion polypeptide such as ligand/receptor-hinge-Fc fusion polypeptide) comprising from N′ to C′: an antigen-binding fragment (e.g., ligand such as PD-L2 extracellular domain, receptor, VHH, scFv, or VH), a hinge region, and an Fc domain subunit or portion thereof (e.g., CH2+CH3, or CH2 only), and wherein the IFN-α or variant thereof is positioned at (e.g., at the N′ of, at the C′ of, or within) the hinge region. In some embodiments, the antigen-binding protein is an antibody (e.g., full-length antibody) specifically recognizing the target antigen, the antigen-binding polypeptide comprising the hinge region is a heavy chain of the antibody, and the IFN-α or variant thereof is positioned at the hinge region of the heavy chain. In some embodiments, the antigen-binding fragment is a ligand, and the target antigen is a receptor specifically recognized by the ligand. In some embodiments, the antigen-binding fragment is a receptor, and the target antigen is a ligand specifically recognized by the receptor. In some embodiments, there is provided an IFN-α (e.g., IFN-α2b) immunocytokine comprising: a) an antibody (e.g., full-length antibody, heavy chain only antibody, or antigen-binding fragment fused to an Fc domain subunit or portion thereof via a hinge region) specifically recognizing a target antigen (e.g., CTLA-4, PD-L1, PD-L2, CD25, HER2, PD-1, CD3, CD4, CD123, or CD8); and b) an IFN-α (e.g., IFN-α2b) or variant thereof, wherein the antibody comprises a heavy chain comprising a hinge region, and wherein the IFN-α (e.g., IFN-α2b) or variant thereof is positioned at the hinge region (e.g., within the hinge region, or between the C-terminus of CH1 and the N-terminus of the hinge region) of the heavy chain. In some embodiments, there is provided an IFN-α (e.g., IFN-α2b) immunocytokine comprising: a) an antibody specifically recognizing a target antigen (e.g., CTLA-4, PD-L1, PD-L2, CD25, HER2, PD-1, CD3, CD4, CD123, or CD8); and b) an IFN-α (e.g., IFN-α2b) or variant thereof, wherein the antibody comprises a heavy chain, and wherein the heavy chain comprises from N-terminus to C-terminus: a VH domain, optionally a CH1 domain, the IFN-α (e.g., IFN-α2b) or variant thereof at the hinge region, a CH2 domain, and optionally a CH3 domain. In some embodiments, there is provided an IFN-α (e.g., IFN-α2b) immunocytokine comprising: a) a full-length antibody specifically recognizing a target antigen (e.g., CTLA-4, PD-L1, PD-L2, CD25, HER2, PD-1, CD3, CD4, CD123, or CD8); and b) an IFN-α (e.g., IFN-α2b) or variant thereof, wherein the IFN-α (e.g., IFN-α2b) or variant thereof is positioned at the hinge region (e.g., within the hinge region, or between the C-terminus of CH1 and the N-terminus of the hinge region) of a heavy chain of the full-length antibody. In some embodiments, there is provided an IFN-α (e.g., IFN-α2b) immunocytokine comprising: a) a full-length antibody specifically recognizing a target antigen (e.g., CTLA-4, PD-L1, PD-L2, CD25, HER2, PD-1, CD3, CD4, CD123, or CD8); and b) an IFN-α (e.g., IFN-α2b) variant comprising one or more mutations at a position selected from the group consisting of R22, L26, F27, L30, K31, D32, R33, H34, D35, F36, S68, T79, K83, Y85, Y89, R120, K121, Y122, Q124, Y129, K131, E132, R144, and E146 relative to an IFN-α comprising the sequence of SEQ ID NO: 3, wherein the IFN-α (e.g., IFN-α2b) variant is positioned at the hinge region (e.g., within the hinge region, or between the C-terminus of CH1 and the N-terminus of the hinge region) of a heavy chain of the full-length antibody. In some embodiments, there is provided an IFN-α (e.g., IFN-α2b) immunocytokine comprising: a) a full-length antibody specifically recognizing a target antigen (e.g., CTLA-4, PD-L1, PD-L2, CD25, HER2, PD-1, CD3, CD4, CD123, or CD8); and b) an IFN-α (e.g., IFN-α2b) variant comprising one or more mutations selected from the group consisting of L30A, K31A, D32A, R33A, H34A, and D35A relative to an IFN-α comprising the sequence of SEQ ID NO: 3, wherein the IFN-α (e.g., IFN-α2b) variant is positioned at the hinge region (e.g., within the hinge region, or between the C-terminus of CH1 and the N-terminus of the hinge region) of a heavy chain of the full-length antibody. In some embodiments, there is provided an IFN-α (e.g., IFN-α2b) immunocytokine comprising: a) a full-length antibody specifically recognizing a target antigen (e.g., CTLA-4, PD-L1, PD-L2, CD25, HER2, PD-1, CD3, CD4, CD123, or CD8); and b) an IFN-α (e.g., IFN-α2b) variant comprising the sequence of any of SEQ ID NOs: 4-9, wherein the IFN-α (e.g., IFN-α2b) variant is positioned at the hinge region (e.g., within the hinge region, or between the C-terminus of CH1 and the N-terminus of the hinge region) of a heavy chain of the full-length antibody. In some embodiments, there is provided an IFN-α (e.g., IFN-α2b) immunocytokine comprising: a) a full-length antibody specifically recognizing a target antigen (e.g., CTLA-4, PD-L1, PD-L2, CD25, HER2, PD-1, CD3, CD4, CD123, or CD8); and b) an IFN-α (e.g., IFN-α2b) variant comprising an L30A mutation relative to an IFN-α comprising the sequence of SEQ ID NO: 3, wherein the IFN-α (e.g., IFN-α2b) variant is positioned at the hinge region (e.g., within the hinge region, or between the C-terminus of CH1 and the N-terminus of the hinge region) of a heavy chain of the full-length antibody. In some embodiments, there is provided an IFN-α (e.g., IFN-α2b) immunocytokine comprising: a) a full-length antibody specifically recognizing a target antigen (e.g., CTLA-4, PD-L1, PD-L2, CD25, HER2, PD-1, CD3, CD4, CD123, or CD8); and b) an IFN-α (e.g., IFN-α2b) variant comprising the sequence of SEQ ID NO: 4, wherein the IFN-α (e.g., IFN-α2b) variant is positioned at the hinge region (e.g., within the hinge region, or between the C-terminus of CH1 and the N-terminus of the hinge region) of a heavy chain of the full-length antibody. In some embodiments, the activity (binding affinity to corresponding cytokine receptor or subunit thereof, and/or biological activity) of the IFN-α (e.g., IFN-α2b) variant in a free state is no more than about 80% (such as no more than about any of 70%, 60%, 50%, 40%, 30%, 20%, 10%, or 5%) of that of a corresponding wildtype IFN-α (e.g., IFN-α2b) in a free state. In some embodiments, the antigen-binding protein (e.g., antibody or fragment thereof, or antigen-binding fragment-hinge-Fc fusion protein such as ligand/receptor-hinge-Fc fusion protein) is monospecific. In some embodiments, the antigen-binding protein is multispecific (e.g., bispecific). In some embodiments, the parental antigen-binding protein (e.g., antibody such as full-length antibody, or antigen-binding fragment-hinge-Fc fusion protein such as ligand/receptor-hinge-Fc fusion protein) is homodimeric. In some embodiments, the parental antigen-binding protein is heterodimeric. In some embodiments, the antigen-binding protein is an agonist. In some embodiments, the antigen-binding protein is an antagonist. In some embodiments, the hinge region comprises the sequence of any of SEQ ID NOs: 40-47, 50-52, and 55-59.

[0144] In some embodiments, the antigen-binding protein is an anti-HER2 antibody. Thus in some embodiments, there is provided an IFN-α (e.g., IFN-α2b) immunocytokine (“IL-2/anti-HER2 immunocytokine”) comprising: a) an antibody (e.g., full-length antibody, heavy chain only antibody, or antigen-binding fragment fused to an Fc domain subunit or portion thereof) specifically recognizing HER2; and b) an IFN-α (e.g., IFN-α2b) or variant thereof (e.g., any of SEQ ID NOs: 3-9), wherein the antibody comprises a heavy chain comprising a hinge region (e.g., any of SEQ ID NOs: 40-47, 50-52, and 55-59), and wherein the IFN-α or variant thereof is positioned at the hinge region (e.g., within the hinge region, or between the C-terminus of CH1 and the N-terminus of the hinge region) of the heavy chain. In some embodiments, there is provided an IFN-α (e.g., IFN-α2b)/anti-HER2 immunocytokine comprising: a) a full-length antibody specifically recognizing HER2; and b) an IFN-α (e.g., IFN-α2b) or variant thereof (e.g., any of SEQ ID NOs: 3-9), wherein the IFN-α or variant thereof is positioned at the hinge region (e.g., any of SEQ ID NOs: 40-47, 50-52, and 55-59)(e.g., within the hinge region, or between the C-terminus of CH1 and the N-terminus of the hinge region) of a heavy chain of the full-length antibody; and wherein the anti-HER2 antibody comprises: i) a VH-CDR1 comprising the sequence of SEQ ID NO: 188; ii) a VH-CDR2 comprising the sequence of SEQ ID NO: 189; iii) a VH-CDR3 comprising the sequence of SEQ ID NO: 190; iv) a VL-CDR1 comprising the sequence of SEQ ID NO: 191; v) a VL-CDR2 comprising the sequence of SEQ ID NO: 192; and vi) a VL-CDR3 comprising the sequence of SEQ ID NO: 193. In some embodiments, the anti-HER2 antibody or antigen binding fragment thereof comprises a VH comprising the sequence of SEQ ID NO: 150 and a VL comprising the sequence of SEQ ID NO: 151. In some embodiments, the parental anti-HER2 antibody comprises two heavy chains each comprising the sequence of SEQ ID NO: 152 or 153, and two light chains each comprising the sequence of SEQ ID NO: 154. In some embodiments, the IFN-α (e.g., IFN-α2b) variant comprises the sequence of SEQ ID NO: 4. In some embodiments, the heavy chain comprising the IFN-α variant positioned at the hinge region comprises the sequence of SEQ ID NO: 157. In some embodiments, there is provided an IFN-α (e.g., IFN-α2b)/anti-HER2 immunocytokine comprising: two light chains comprising the sequence of SEQ ID NO: 154, one heavy chain comprising an IFN-α variant positioned at the hinge region comprising the sequence of SEQ ID NO: 157, and one heavy chain comprises the sequence of SEQ ID NO: 155. In some embodiments, in the presence of binding of the antibody (or antigen-binding fragment) to HER2, the activity (binding affinity to corresponding cytokine receptor or subunit thereof, and/or biological activity) of the IFN-α cytokine or variant thereof increases at least about 20% (such as at least about any of 30%, 40%, 50%, 60%, 70%, 80%, 90%, 100%, 200%, 300%, 400%, 500%, or more) compared to that in the absence of binding of the antibody (or antigen-binding fragment) to HER2. In some embodiments, in the absence of binding of the antibody (or antigen-binding fragment) to HER2, the activity (binding affinity to corresponding cytokine receptor or subunit thereof, and/or biological activity) of the IFN-α cytokine or variant thereof positioned at the hinge region of the heavy chain is no more than about 70% (such as no more than about any of 60%, 50%, 40%, 30%, 20%, 10%, 9%, 8%, 7%, 6%, 5%, 4%, 3%, 2%, 1%, 0.9%, 0.8%, 0.7%, 0.6%, 0.5%, 0.4%, 0.3%, 0.2%, 0.1%, or 0%) of that of a corresponding IFN-α cytokine or variant thereof in a free state. In some embodiments, the antibody is monospecific. In some embodiments, the antibody is multispecific (e.g., bispecific). In some embodiments, the antibody is homodimeric. In some embodiments, the antibody is heterodimeric. In some embodiments, the antibody is an agonist antibody. In some embodiments, the antibody is an antagonist antibody.

[0145] In some embodiments, the antigen-binding protein is an anti-CD3 antibody. Thus in some embodiments, there is provided an IFN-α (e.g., IFN-α2b) immunocytokine (“IL-2/anti-CD3 immunocytokine”) comprising: a) an antibody (e.g., full-length antibody, heavy chain only antibody, or antigen-binding fragment fused to an Fc domain subunit or portion thereof) specifically recognizing CD3; and b) an IFN-α (e.g., IFN-α2b) or variant thereof (e.g., any of SEQ ID NOs: 3-9), wherein the antibody comprises a heavy chain comprising a hinge region (e.g., any of SEQ ID NOs: 40-47, 50-52, and 55-59), and wherein the IFN-α or variant thereof is positioned at the hinge region (e.g., within the hinge region, or between the C-terminus of CH1 and the N-terminus of the hinge region) of the heavy chain. In some embodiments, there is provided an IFN-α (e.g., IFN-α2b)/anti-CD3 immunocytokine comprising: a) a full-length antibody specifically recognizing CD3; and b) an IFN-α (e.g., IFN-α2b) or variant thereof (e.g., any of SEQ ID NOs: 3-9), wherein the IFN-α or variant thereof is positioned at the hinge region (e.g., any of SEQ ID NOs: 40-47, 50-52, and 55-59)(e.g., within the hinge region, or between the C-terminus of CH1 and the N-terminus of the hinge region) of a heavy chain of the full-length antibody; and wherein the anti-CD3 antibody comprises: i) a VH-CDR1 comprising the sequence of SEQ ID NO: 85; ii) a VH-CDR2 comprising the sequence of SEQ ID NO: 86; iii) a VH-CDR3 comprising the sequence of SEQ ID NO: 87; iv) a VL-CDR1 comprising the sequence of SEQ ID NO: 88; v) a VL-CDR2 comprising the sequence of SEQ ID NO: 89; and vi) a VL-CDR3 comprising the sequence of SEQ ID NO: 90. In some embodiments, the anti-CD3 antibody comprises a VH comprising the sequence of SEQ ID NO: 91 and a VL comprising the sequence of SEQ ID NO: 92. In some embodiments, the parental anti-CD3 antibody comprises two heavy chains each comprising the sequence of SEQ ID NO: 93, and two light chains each comprising the sequence of SEQ ID NO: 94. In some embodiments, the IFN-α (e.g., IFN-α2b) variant comprises the sequence of SEQ ID NO: 4. In some embodiments, the heavy chain comprising the IFN-α variant positioned at the hinge region comprises the sequence of SEQ ID NO: 97. In some embodiments, there is provided an IFN-α (e.g., IFN-α2b)/anti-CD3 immunocytokine comprising: two light chains comprising the sequence of SEQ ID NO: 94, one heavy chain comprising an IFN-α variant positioned at the hinge region comprising the sequence of SEQ ID NO: 97, and one heavy chain comprises the sequence of SEQ ID NO: 95. In some embodiments, in the presence of binding of the antibody (or antigen-binding fragment) to CD3, the activity (binding affinity to corresponding cytokine receptor or subunit thereof, and/or biological activity) of the IFN-α (e.g., IFN-α2b) cytokine or variant thereof increases at least about 20% (such as at least about any of 30%, 40%, 50%, 60%, 70%, 80%, 90%, 100%, 200%, 300%, 400%, 500%, or more) compared to that in the absence of binding of the antibody (or antigen-binding fragment) to CD3. In some embodiments, in the absence of binding of the antibody (or antigen-binding fragment) to CD3, the activity (binding affinity to corresponding cytokine receptor or subunit thereof, and/or biological activity) of the IFN-α (e.g., IFN-α2b) cytokine or variant thereof positioned at the hinge region of the heavy chain is no more than about 70% (such as no more than about any of 60%, 50%, 40%, 30%, 20%, 10%, 9%, 8%, 7%, 6%, 5%, 4%, 3%, 2%, %, 0.9%, 0.8%, 0.7%, 0.6%, 0.5%, 0.4%, 0.3%, 0.2%, 0.1%, or 0%) of that of a corresponding IFN-α cytokine or variant thereof in a free state. In some embodiments, the antibody is monospecific. In some embodiments, the antibody is multispecific (e.g., bispecific). In some embodiments, the antibody is homodimeric. In some embodiments, the antibody is heterodimeric. In some embodiments, the antibody is an agonist antibody. In some embodiments, the antibody is an antagonist antibody.

[0146] In some embodiments, the antigen-binding protein is an anti-PD-1 antibody. Thus in some embodiments, there is provided an IFN-α (e.g., IFN-α2b) immunocytokine (“IFN-α/anti-PD-1 immunocytokine”) comprising: a) an antibody (e.g., full-length antibody, heavy chain only antibody, or antigen-binding fragment fused to an Fc domain subunit or portion thereof) specifically recognizing PD-1; and b) an IFN-α (e.g., IFN-α2b) or variant thereof (e.g., any of SEQ ID NOs: 3-9), wherein the antibody comprises a heavy chain comprising a hinge region (e.g., any of SEQ ID NOs: 40-47, 50-52, and 55-59), and wherein the IFN-α (e.g., IFN-α2b) or variant thereof is positioned at the hinge region (e.g., within the hinge region, or between the C-terminus of CH1 and the N-terminus of the hinge region) of the heavy chain. In some embodiments, there is provided an IFN-α (e.g., IFN-α2b)/anti-PD-1 immunocytokine comprising: a) a full-length antibody specifically recognizing PD-1; and b) an IFN-α (e.g., IFN-α2b) or variant thereof (e.g., any of SEQ ID NOs: 3-9), wherein the IFN-α (e.g., IFN-α2b) or variant thereof is positioned at the hinge region (e.g., any of SEQ ID NOs: 40-47, 50-52, and 55-59)(e.g., within the hinge region, or between the C-terminus of CH1 and the N-terminus of the hinge region) of a heavy chain of the full-length antibody; and wherein the anti-PD-1 antibody comprises VH-CDR1, VH-CDR2, and VH-CDR3 of a VH comprising the sequence of SEQ ID NO: 102, and VL-CDR1, VL-CDR2, and VL-CDR3 of a VL comprising the sequence of SEQ ID NO: 103. In some embodiments, the anti-PD-1 antibody comprises a VH comprising the sequence of SEQ ID NO: 102 and a VL comprising the sequence of SEQ ID NO: 103. In some embodiments, the parental anti-PD-1 antibody comprises two heavy chains each comprising the sequence of SEQ ID NO: 104 or 105, and two light chains each comprising the sequence of SEQ ID NO: 106. In some embodiments, the IFN-α (e.g., IFN-α2b) variant comprises the sequence of SEQ ID NO: 4. In some embodiments, the heavy chain comprising the IFN-α (e.g., IFN-α2b) variant positioned at the hinge region comprises the sequence of SEQ ID NO: 109. In some embodiments, there is provided an IFN-α (e.g., IFN-α2b)/anti-PD-1 immunocytokine comprising: two light chains comprising the sequence of SEQ ID NO: 106, one heavy chain comprising an IFN-α variant positioned at the hinge region comprising the sequence of SEQ ID NO: 109, and one heavy chain comprises the sequence of SEQ ID NO: 107.

[0147] In some embodiments, in the presence of binding of the antibody (or antigen-binding fragment) to PD-1, the activity (binding affinity to corresponding cytokine receptor or subunit thereof, and/or biological activity) of the IFN-α (e.g., IFN-α2b) or variant thereof increases at least about 20% (such as at least about any of 30%, 40%, 50%, 60%, 70%, 80%, 90%, 100%, 200%, 300%, 400%, 500%, or more) compared to that in the absence of binding of the antibody (or antigen-binding fragment) to PD-1. In some embodiments, in the absence of binding of the antibody (or antigen-binding fragment) to PD-1, the activity (binding affinity to corresponding cytokine receptor or subunit thereof, and/or biological activity) of the IFN-α (e.g., IFN-α2b) or variant thereof positioned at the hinge region of the heavy chain is no more than about 70% (such as no more than about any of 60%, 50%, 40%, 30%, 20%, 10%, 9%, 8%, 7%, 6%, 5%, 4%, 3%, 2%, 1%, 0.9%, 0.8%, 0.7%, 0.6%, 0.5%, 0.4%, 0.3%, 0.2%, 0.1%, or 0%) of that of a corresponding IFN-α (e.g., IFN-α2b) or variant thereof in a free state. In some embodiments, the antibody is monospecific. In some embodiments, the antibody is multispecific (e.g., bispecific). In some embodiments, the antibody is homodimeric. In some embodiments, the antibody is heterodimeric. In some embodiments, the antibody is an agonist antibody. In some embodiments, the antibody is an antagonist antibody.

[0148] In some embodiments, the antigen-binding protein is an anti-CD4 antibody. Thus in some embodiments, there is provided an IFN-α (e.g., IFN-α2b) immunocytokine (“IFN-α/anti-CD4 immunocytokine”) comprising: a) an antibody (e.g., full-length antibody, heavy chain only antibody, or antigen-binding fragment fused to an Fc domain subunit or portion thereof) specifically recognizing CD4; and b) an IFN-α (e.g., IFN-α2b) or variant thereof (e.g., any of SEQ ID NOs: 3-9), wherein the antibody comprises a heavy chain comprising a hinge region (e.g., any of SEQ ID NOs: 40-47, 50-52, and 55-59), and wherein the IFN-α or variant thereof is positioned at the hinge region (e.g., within the hinge region, or between the C-terminus of CH1 and the N-terminus of the hinge region) of the heavy chain. In some embodiments, there is provided an IFN-α (e.g., IFN-α2b)/anti-CD4 immunocytokine comprising: a) a full-length antibody specifically recognizing CD4; and b) an IFN-α (e.g., IFN-α2b) or variant thereof (e.g., any of SEQ ID NOs: 3-9), wherein the IFN-α or variant thereof is positioned at the hinge region (e.g., any of SEQ ID NOs: 40-47, 50-52, and 55-59)(e.g., within the hinge region, or between the C-terminus of CH1 and the N-terminus of the hinge region) of a heavy chain of the full-length antibody; and wherein the anti-CD4 antibody comprises: i) a VH-CDR1 comprising the sequence of SEQ ID NO: 67; ii) a VH-CDR2 comprising the sequence of SEQ ID NO: 68; iii) a VH-CDR3 comprising the sequence of SEQ ID NO: 69; iv) a VL-CDR1 comprising the sequence of SEQ ID NO: 70; v) a VL-CDR2 comprising the sequence of SEQ ID NO: 71; and vi) a VL-CDR3 comprising the sequence of SEQ ID NO: 72. In some embodiments, the anti-CD4 antibody comprises a VH comprising the sequence of SEQ ID NO: 73 and a VL comprising the sequence of SEQ ID NO: 74. In some embodiments, the parental anti-CD4 antibody comprises two heavy chains each comprising the sequence of SEQ ID NO: 75 or 76, and two light chains each comprising the sequence of SEQ ID NO: 77. In some embodiments, the IFN-α (e.g., IFN-α2b) variant comprises the sequence of SEQ ID NO: 4. In some embodiments, the heavy chain comprising the IFN-α variant positioned at the hinge region comprises the sequence of SEQ ID NO: 80. In some embodiments, there is provided an IFN-α (e.g., IFN-α2b)/anti-CD4 immunocytokine comprising: two light chains comprising the sequence of SEQ ID NO: 77, one heavy chain comprising an IFN-α variant positioned at the hinge region comprising the sequence of SEQ ID NO: 80, and one heavy chain comprises the sequence of SEQ ID NO: 78. In some embodiments, in the presence of binding of the antibody (or antigen-binding fragment) to CD4, the activity (binding affinity to corresponding cytokine receptor or subunit thereof, and/or biological activity) of the IFN-α (e.g., IFN-α2b) cytokine or variant thereof increases at least about 20% (such as at least about any of 30%, 40%, 50%, 60%, 70%, 80%, 90%, 100%, 200%, 300%, 400%, 500%, or more) compared to that in the absence of binding of the antibody (or antigen-binding fragment) to CD4. In some embodiments, in the absence of binding of the antibody (or antigen-binding fragment) to CD4, the activity (binding affinity to corresponding cytokine receptor or subunit thereof, and/or biological activity) of the IFN-α (e.g., IFN-α2b) cytokine or variant thereof positioned at the hinge region of the heavy chain is no more than about 70% (such as no more than about any of 60%, 50%, 40%, 30%, 20%, 10%, 9%, 8%, 7%, 6%, 5%, 4%, 3%, 2%, %, 0.9%, 0.8%, 0.7%, 0.6%, 0.5%, 0.4%, 0.3%, 0.2%, 0.1%, or 0%) of that of a corresponding IFN-α (e.g., IFN-α2b) cytokine or variant thereof in a free state. In some embodiments, the antibody is monospecific. In some embodiments, the antibody is multispecific (e.g., bispecific). In some embodiments, the antibody is homodimeric. In some embodiments, the antibody is heterodimeric. In some embodiments, the antibody is an agonist antibody. In some embodiments, the antibody is an antagonist antibody.

[0149] In some embodiments, the antigen-binding protein is an anti-CD8 antibody. Thus in some embodiments, there is provided an IFN-α (e.g., IFN-α2b) immunocytokine (“IFN-α/anti-CD8 immunocytokine”) comprising: a) an antibody (e.g., full-length antibody, heavy chain only antibody, or antigen-binding fragment fused to an Fc domain subunit or portion thereof) specifically recognizing CD8; and b) an IFN-α (e.g., IFN-α2b) or variant thereof (e.g., any of SEQ ID NOs: 3-9), wherein the antibody comprises a heavy chain comprising a hinge region (e.g., any of SEQ ID NOs: 40-47, 50-52, and 55-59), and wherein the IFN-α or variant thereof is positioned at the hinge region (e.g., within the hinge region, or between the C-terminus of CH1 and the N-terminus of the hinge region) of the heavy chain. In some embodiments, there is provided an IFN-α (e.g., IFN-α2b)/anti-CD8 immunocytokine comprising: a) a full-length antibody specifically recognizing CD8; and b) an IFN-α (e.g., IFN-α2b) or variant thereof (e.g., any of SEQ ID NOs: 3-9), wherein the IFN-α or variant thereof is positioned at the hinge region (e.g., any of SEQ ID NOs: 40-47, 50-52, and 55-59)(e.g., within the hinge region, between the C-terminus of CH1 and the N-terminus of the hinge region) of a heavy chain of the full-length antibody; and wherein the anti-CD8 antibody comprises VH-CDR1, VH-CDR2, and VH-CDR3 of a VH comprising the sequence of SEQ ID NO: 114, and VL-CDR1, VL-CDR2, and VL-CDR3 of a VL comprising the sequence of SEQ ID NO: 115. In some embodiments, the anti-CD8 antibody comprises a VH comprising the sequence of SEQ ID NO: 114 and a VL comprising the sequence of SEQ ID NO: 115. In some embodiments, the parental anti-CD8 antibody comprises two heavy chains each comprising the sequence of SEQ ID NO: 116, and two light chains each comprising the sequence of SEQ ID NO: 117. In some embodiments, the IFN-α (e.g., IFN-α2b) variant comprises the sequence of SEQ ID NO: 4. In some embodiments, the heavy chain comprising the IFN-α variant positioned at the hinge region comprises the sequence of SEQ ID NO: 120. In some embodiments, there is provided an IFN-α (e.g., IFN-α2b)/anti-CD8 immunocytokine comprising: two light chains comprising the sequence of SEQ ID NO: 117, one heavy chain comprising an IFN-α variant positioned at the hinge region comprising the sequence of SEQ ID NO: 120, and one heavy chain comprises the sequence of SEQ ID NO: 118. In some embodiments, in the presence of binding of the antibody (or antigen-binding fragment) to CD8, the activity (binding affinity to corresponding cytokine receptor or subunit thereof, and/or biological activity) of the IFN-α (e.g., IFN-α2b) cytokine or variant thereof increases at least about 20% (such as at least about any of 30%, 40%, 50%, 60%, 70%, 80%, 90%, 100%, 200%, 300%, 400%, 500%, or more) compared to that in the absence of binding of the antibody (or antigen-binding fragment) to CD8. In some embodiments, in the absence of binding of the antibody (or antigen-binding fragment) to CD8, the activity (binding affinity to corresponding cytokine receptor or subunit thereof, and/or biological activity) of the IFN-α (e.g., IFN-α2b) cytokine or variant thereof positioned at the hinge region of the heavy chain is no more than about 70% (such as no more than about any of 60%, 50%, 40%, 30%, 20%, 10%, 9%, 8%, 7%, 6%, 5%, 4%, 3%, 2%, 1%, 0.9%, 0.8%, 0.7%, 0.6%, 0.5%, 0.4%, 0.3%, 0.2%, 0.1%, or 0%) of that of a corresponding IFN-α cytokine or variant thereof in a free state. In some embodiments, the antibody is monospecific. In some embodiments, the antibody is multispecific (e.g., bispecific). In some embodiments, the antibody is homodimeric. In some embodiments, the antibody is heterodimeric. In some embodiments, the antibody is an agonist antibody. In some embodiments, the antibody is an antagonist antibody.

[0150] In some embodiments, the antigen-binding protein is an anti-CTLA-4 antibody. Thus in some embodiments, there is provided an IFN-α (e.g., IFN-α2b) immunocytokine (“IFN-α/anti-CTLA-4 immunocytokine”) comprising: a) an antibody (e.g., full-length antibody, heavy chain only antibody, or antigen-binding fragment fused to an Fc domain subunit or portion thereof) specifically recognizing CTLA-4; and b) an IFN-α (e.g., IFN-α2b) or variant thereof (e.g., any of SEQ ID NOs: 3-9), wherein the antibody comprises a heavy chain comprising a hinge region (e.g., any of SEQ ID NOs: 40-47, 50-52, and 55-59), and wherein the IFN-α or variant thereof is positioned at the hinge region (e.g., within the hinge region, or between the C-terminus of CH1 and the N-terminus of the hinge region) of the heavy chain. In some embodiments, there is provided an IFN-α (e.g., IFN-α2b)/anti-CTLA-4 immunocytokine comprising: a) a full-length antibody specifically recognizing CTLA-4; and b) an IFN-α (e.g., IFN-α2b) or variant thereof (e.g., any of SEQ ID NOs: 3-9), wherein the IFN-α or variant thereof is positioned at the hinge region (e.g., any of SEQ ID NOs: 40-47, 50-52, and 55-59)(e.g., within the hinge region, between the C-terminus of CH1 and the N-terminus of the hinge region) of a heavy chain of the full-length antibody; and wherein the anti-CTLA-4 antibody comprises VH-CDR1, VH-CDR2, and VH-CDR3 of a VH comprising the sequence of SEQ ID NO: 125, and VL-CDR1, VL-CDR2, and VL-CDR3 of a VL comprising the sequence of SEQ ID NO: 126. In some embodiments, the anti-CTLA-4 antibody comprises a VH comprising the sequence of SEQ ID NO: 125 and a VL comprising the sequence of SEQ ID NO: 126. In some embodiments, the parental anti-CTLA-4 antibody comprises two heavy chains each comprising the sequence of SEQ ID NO: 127 or 128, and two light chains each comprising the sequence of SEQ ID NO: 129. In some embodiments, the IFN-α (e.g., IFN-α2b) variant comprises the sequence of SEQ ID NO: 4. In some embodiments, the heavy chain comprising the IFN-α variant positioned at the hinge region comprises the sequence of SEQ ID NO: 132. In some embodiments, there is provided an IFN-α (e.g., IFN-α2b)/anti-CTLA-4 immunocytokine comprising: two light chains comprising the sequence of SEQ ID NO: 129, one heavy chain comprising an IFN-α variant positioned at the hinge region comprising the sequence of SEQ ID NO: 132, and one heavy chain comprises the sequence of SEQ ID NO: 130. In some embodiments, in the presence of binding of the antibody (or antigen-binding fragment) to CTLA-4, the activity (binding affinity to corresponding cytokine receptor or subunit thereof, and/or biological activity) of the IFN-α (e.g., IFN-α2b) cytokine or variant thereof increases at least about 20% (such as at least about any of 30%, 40%, 50%, 60%, 70%, 80%, 90%, 100%, 200%, 300%, 400%, 500%, or more) compared to that in the absence of binding of the antibody (or antigen-binding fragment) to CTLA-4. In some embodiments, in the absence of binding of the antibody (or antigen-binding fragment) to CTLA-4, the activity (binding affinity to corresponding cytokine receptor or subunit thereof, and/or biological activity) of the IFN-α (e.g., IFN-α2b) cytokine or variant thereof positioned at the hinge region of the heavy chain is no more than about 70% (such as no more than about any of 60%, 50%, 40%, 30%, 20%, 10%, 9%, 8%, 7%, 6%, 5%, 4%, 3%, 2%, 1%, 0.9%, 0.8%, 0.7%, 0.6%, 0.5%, 0.4%, 0.3%, 0.2%, 0.1%, or 0%) of that of a corresponding IFN-α cytokine or variant thereof in a free state. In some embodiments, the antibody is monospecific. In some embodiments, the antibody is multispecific (e.g., bispecific). In some embodiments, the antibody is homodimeric. In some embodiments, the antibody is heterodimeric. In some embodiments, the antibody is an agonist antibody. In some embodiments, the antibody is an antagonist antibody.

[0151] In some embodiments, the antigen-binding protein is an anti-PD-L1 antibody. Thus in some embodiments, there is provided an IFN-α (e.g., IFN-α2b) immunocytokine (“IFN-α/anti-PD-L1 immunocytokine”) comprising: a) an antibody (e.g., full-length antibody, heavy chain only antibody, or antigen-binding fragment fused to an Fc domain subunit or portion thereof) specifically recognizing PD-L1; and b) an IFN-α (e.g., IFN-α2b) or variant thereof (e.g., any of SEQ ID NOs: 3-9), wherein the antibody comprises a heavy chain comprising a hinge region (e.g., any of SEQ ID NOs: 40-47, 50-52, and 55-59), and wherein the IFN-α or variant thereof is positioned at the hinge region (e.g., within the hinge region, between the C-terminus of CH1 and the N-terminus of the hinge region) of the heavy chain. In some embodiments, there is provided an IFN-α (e.g., IFN-α2b)/anti-PD-L1 immunocytokine comprising: a) a full-length antibody specifically recognizing PD-L1; and b) an IFN-α (e.g., IFN-α2b) or variant thereof (e.g., any of SEQ ID NOs: 3-9), wherein the IFN-α or variant thereof is positioned at the hinge region (e.g., any of SEQ ID NOs: 40-47, 50-52, and 55-59)(e.g., within the hinge region, between the C-terminus of CH1 and the N-terminus of the hinge region) of a heavy chain of the full-length antibody; and wherein the anti-PD-L1 antibody comprises: i) a VH-CDR1 comprising the sequence of SEQ ID NO: 243; ii) a VH-CDR2 comprising the sequence of SEQ ID NO: 244; iii) a VH-CDR3 comprising the sequence of SEQ ID NO: 245; iv) a VL-CDR1 comprising the sequence of SEQ ID NO: 246; v) a VL-CDR2 comprising the sequence of SEQ ID NO: 247; and vi) a VL-CDR3 comprising the sequence of SEQ ID NO: 248. In some embodiments, the anti-PD-L1 antibody comprises a VH comprising the sequence of SEQ ID NO: 137 and a VL comprising the sequence of SEQ ID NO: 138. In some embodiments, the parental anti-PD-L1 antibody comprises two heavy chains each comprising the sequence of SEQ ID NO: 139, and two light chains each comprising the sequence of SEQ ID NO: 140. In some embodiments, the parental anti-PD-L1 antibody comprises two heavy chains each comprising the sequence of SEQ ID NO: 141, and two light chains each comprising the sequence of SEQ ID NO: 142. In some embodiments, the IFN-α (e.g., IFN-α2b) variant comprises the sequence of SEQ ID NO: 4. In some embodiments, the heavy chain comprising the IFN-α (e.g., IFN-α2b) variant positioned at the hinge region comprises the sequence of SEQ ID NO: 145. In some embodiments, there is provided an IFN-α (e.g., IFN-α2b)/anti-PD-L1 immunocytokine comprising: two light chains comprising the sequence of SEQ ID NO: 140, one heavy chain comprising an IFN-α variant positioned at the hinge region comprising the sequence of SEQ ID NO: 145, and one heavy chain comprises the sequence of SEQ ID NO: 143. In some embodiments, in the presence of binding of the antibody (or antigen-binding fragment) to PD-L1, the activity (binding affinity to corresponding cytokine receptor or subunit thereof, and/or biological activity) of the IFN-α (e.g., IFN-α2b) cytokine or variant thereof increases at least about 20% (such as at least about any of 30%, 40%, 50%, 60%, 70%, 80%, 90%, 100%, 200%, 300%, 400%, 500%, or more) compared to that in the absence of binding of the antibody (or antigen-binding fragment) to PD-L1. In some embodiments, in the absence of binding of the antibody (or antigen-binding fragment) to PD-L1, the activity (binding affinity to corresponding cytokine receptor or subunit thereof, and/or biological activity) of the IFN-α (e.g., IFN-α2b) cytokine or variant thereof positioned at the hinge region of the heavy chain is no more than about 70% (such as no more than about any of 60%, 50%, 40%, 30%, 20%, 10%, 9%, 8%, 7%, 6%, 5%, 4%, 3%, 2%, %, 0.9%, 0.8%, 0.7%, 0.6%, 0.5%, 0.4%, 0.3%, 0.2%, 0.1%, or 0%) of that of a corresponding IFN-α cytokine or variant thereof in a free state. In some embodiments, the antibody is monospecific. In some embodiments, the antibody is multispecific (e.g., bispecific). In some embodiments, the antibody is homodimeric. In some embodiments, the antibody is heterodimeric.

[0152] In some embodiments, the antigen-binding protein is an anti-CD25 antibody. Thus in some embodiments, there is provided an IFN-α (e.g., IFN-α2b) immunocytokine (“IFN-α/anti-CD25 immunocytokine”) comprising: a) an antibody (e.g., full-length antibody, heavy chain only antibody, or antigen-binding fragment fused to an Fc domain subunit or portion thereof) specifically recognizing CD25; and b) an IFN-α (e.g., IFN-α2b) or variant thereof (e.g., any of SEQ ID NOs: 3-9), wherein the antibody comprises a heavy chain comprising a hinge region (e.g., any of SEQ ID NOs: 40-47, 50-52, and 55-59), and wherein the IFN-α or variant thereof is positioned at the hinge region (e.g., within the hinge region, or between the C-terminus of CH1 and the N-terminus of the hinge region) of the heavy chain. In some embodiments, there is provided an IFN-α (e.g., IFN-α2b)/anti-CD25 immunocytokine comprising: a) a full-length antibody specifically recognizing CD25; and b) an IFN-α (e.g., IFN-α2b) or variant thereof (e.g., any of SEQ ID NOs: 3-9), wherein the IFN-α or variant thereof is positioned at the hinge region (e.g., any of SEQ ID NOs: 40-47, 50-52, and 55-59)(e.g., within the hinge region, between the C-terminus of CH1 and the N-terminus of the hinge region) of a heavy chain of the full-length antibody; and wherein the anti-CD25 antibody comprises VH-CDR1, VH-CDR2, and VH-CDR3 of a VH comprising the sequence of SEQ ID NO: 162, and VL-CDR1, VL-CDR2, and VL-CDR3 of a VL comprising the sequence of SEQ ID NO: 163. In some embodiments, the anti-CD25 antibody comprises a VH comprising the sequence of SEQ ID NO: 162 and a VL comprising the sequence of SEQ ID NO: 163. In some embodiments, the parental anti-CD25 antibody comprises two heavy chains each comprising the sequence of SEQ ID NO: 164, and two light chains each comprising the sequence of SEQ ID NO: 165. In some embodiments, the parental anti-CD25 antibody comprises two heavy chains each comprising the sequence of SEQ ID NO: 166, and two light chains each comprising the sequence of SEQ ID NO: 167. In some embodiments, the IFN-α (e.g., IFN-α2b) variant comprises the sequence of SEQ ID NO: 4. In some embodiments, the heavy chain comprising the IFN-α (e.g., IFN-α2b) variant positioned at the hinge region comprises the sequence of SEQ ID NO: 170. In some embodiments, there is provided an IFN-α (e.g., IFN-α2b)/anti-CD25 immunocytokine comprising: two light chains comprising the sequence of SEQ ID NO: 165, one heavy chain comprising an IFN-α variant positioned at the hinge region comprising the sequence of SEQ ID NO: 170, and one heavy chain comprises the sequence of SEQ ID NO: 168. In some embodiments, in the presence of binding of the antibody (or antigen-binding fragment) to CD25, the activity (binding affinity to corresponding cytokine receptor or subunit thereof, and/or biological activity) of the IFN-α (e.g., IFN-α2b) cytokine or variant thereof increases at least about 20% (such as at least about any of 30%, 40%, 50%, 60%, 70%, 80%, 90%, 100%, 200%, 300%, 400%, 500%, or more) compared to that in the absence of binding of the antibody (or antigen-binding fragment) to CD25. In some embodiments, in the absence of binding of the antibody (or antigen-binding fragment) to CD25, the activity (binding affinity to corresponding cytokine receptor or subunit thereof, and/or biological activity) of the IFN-α (e.g., IFN-α2b) cytokine or variant thereof positioned at the hinge region of the heavy chain is no more than about 70% (such as no more than about any of 60%, 50%, 40%, 30%, 20%, 10%, 9%, 8%, 7%, 6%, 5%, 4%, 3%, 2%, 1%, 0.9%, 0.8%, 0.7%, 0.6%, 0.5%, 0.4%, 0.3%, 0.2%, 0.1%, or 0%) of that of a corresponding IFN-α cytokine or variant thereof in a free state. In some embodiments, the antibody is monospecific. In some embodiments, the antibody is multispecific (e.g., bispecific). In some embodiments, the antibody is homodimeric. In some embodiments, the antibody is heterodimeric. In some embodiments, the antibody is an agonist antibody. In some embodiments, the antibody is an antagonist antibody.

[0153] In some embodiments, the antigen-binding protein is a PD-L2 (e.g., PD-L2 extracellular domain)-hinge-Fc fusion protein. Thus in some embodiments, there is provided an IFN-α (e.g., IFN-α2b) immunocytokine (“IFN-α/PD-L2-Fc immunocytokine”) comprising: a) a PD-L2-hinge-Fc fusion polypeptide comprising from N′ to C′: a PD-L2 (e.g., SEQ ID NO: 176) specifically recognizing PD-1, a hinge region (e.g., any of SEQ ID NOs: 40-47, 50-52, and 55-59), and an Fc domain subunit or portion thereof; and b) an IFN-α (e.g., IFN-α2b) or variant thereof (e.g., any of SEQ ID NOs: 3-9), and wherein the IFN-α or variant thereof is positioned at the hinge region (e.g., within the hinge region, or between the C-terminus of PD-L2 and the N-terminus of the hinge region) of the PD-L2-hinge-Fc fusion polypeptide. In some embodiments, the parental PD-L2-hinge-Fc fusion protein comprises two PD-L2-hinge-Fc fusion polypeptides each comprising the sequence of SEQ ID NO: 177. In some embodiments, the IFN-α (e.g., IFN-α2b) variant comprises the sequence of SEQ ID NO: 4. In some embodiments, the PD-L2-hinge-Fc fusion polypeptide comprising the IFN-α (e.g., IFN-α2b) variant positioned at the hinge region comprises the sequence of SEQ ID NO: 182. In some embodiments, there is provided an IFN-α/PD-L2-Fc immunocytokine comprising: a PD-L2-hinge-Fc fusion polypeptide comprising an IFN-α variant positioned at the hinge region comprises the sequence of SEQ ID NO: 182, and a PD-L2-hinge-Fc fusion polypeptide comprises the sequence of SEQ ID NO: 181. In some embodiments, in the presence of binding of the PD-L2 ligand to PD-1, the activity (binding affinity to corresponding cytokine receptor or subunit thereof, and/or biological activity) of the IFN-α (e.g., IFN-α2b) cytokine or variant thereof increases at least about 20% (such as at least about any of 30%, 40%, 50%, 60%, 70%, 80%, 90%, 100%, 200%, 300%, 400%, 500%, or more) compared to that in the absence of binding of the PD-L2 ligand to PD-1. In some embodiments, in the absence of binding of the PD-L2 ligand to PD-1, the activity (binding affinity to corresponding cytokine receptor or subunit thereof, and/or biological activity) of the IFN-α (e.g., IFN-α2b) cytokine or variant thereof positioned at the hinge region is no more than about 70% (such as no more than about any of 60%, 50%, 40%, 30%, 20%, 10%, 9%, 8%, 7%, 6%, 5%, 4%, 3%, 2%, 1%, 0.9%, 0.8%, 0.7%, 0.6%, 0.5%, 0.4%, 0.3%, 0.2%, 0.1%, or 0%) of that of a corresponding IFN-α cytokine or variant thereof in a free state. In some embodiments, the PD-L2-hinge-Fc fusion protein is monospecific. In some embodiments, the PD-L2-hinge-Fc fusion protein is multispecific (e.g., bispecific). In some embodiments, the PD-L2-hinge-Fc fusion protein is homodimeric. In some embodiments, the PD-L2-hinge-Fc fusion protein is heterodimeric. In some embodiments, the PD-L2 moiety is an agonist that can stimulate or enhance PD-1 signaling. In some embodiments, the PD-L2 moiety is an antagonist that can reduce or block PD-1 signaling.

[0154] In some embodiments, the cytokine or variant thereof is IFN-γ or variant thereof. In some embodiments, there is provided an IFN-γ immunocytokine comprising: a) an antigen-binding protein (e.g., antibody such as full-length antibody, or antigen-binding fragment-hinge-Fc fusion protein such as ligand/receptor-hinge-Fc fusion protein) specifically recognizing a target antigen (e.g., CTLA-4, PD-L1, PD-L2, CD25, HER2, PD-1, CD3, CD4, CD123, or CD8); and b) an IFN-γ or variant thereof (e.g., SEQ ID NO: 18 or 19), wherein the antigen-binding protein comprises an antigen-binding polypeptide (e.g., antibody heavy chain, or antigen-binding fragment-hinge-Fc fusion polypeptide such as ligand/receptor-hinge-Fc fusion polypeptide) comprising from N′ to C′: an antigen-binding fragment (e.g., ligand such as PD-L2 extracellular domain, receptor, VHH, scFv, or VH), a hinge region, and an Fc domain subunit or portion thereof (e.g., CH2+CH3, or CH2 only), and wherein both subunits (e.g., any of SEQ ID NOs: 10⁻¹⁷) of the IFN-γ or variant thereof are positioned in tandem (e.g., connected via an optional peptide linker such as any of SEQ ID NOs: 227-229) at (e.g., at the N′ of, at the C′ of, or within) the hinge region. In some embodiments, the antigen-binding protein is an antibody (e.g., full-length antibody) specifically recognizing the target antigen, the antigen-binding polypeptide comprising the hinge region is a heavy chain of the antibody, and both subunits (e.g., any of SEQ ID NOs: 10⁻¹⁷) of the IFN-γ or variant thereof are positioned in tandem (e.g., connected via an optional peptide linker such as any of SEQ ID NOs: 227-229) at the hinge region of the heavy chain. In some embodiments, the antigen-binding fragment is a ligand, and the target antigen is a receptor specifically recognized by the ligand. In some embodiments, the antigen-binding fragment is a receptor, and the target antigen is a ligand specifically recognized by the receptor. In some embodiments, there is provided an IFN-γ immunocytokine comprising: a) an antibody (e.g., full-length antibody, heavy chain only antibody, or antigen-binding fragment fused to an Fc domain subunit or portion thereof via a hinge region) specifically recognizing a target antigen (e.g., CTLA-4, PD-L1, PD-L2, CD25, HER2, PD-1, CD3, CD4, CD123, or CD8); and b) an IFN-γ or variant thereof (e.g., SEQ ID NO: 18 or 19), wherein the antibody comprises a heavy chain comprising a hinge region, and wherein both subunits (e.g., any of SEQ ID NOs: 10⁻¹⁷) of the IFN-γ or variant thereof are positioned in tandem (e.g., connected via an optional peptide linker such as any of SEQ ID NOs: 227-229) at the hinge region (e.g., within the hinge region, or between the C-terminus of CH1 and the N-terminus of the hinge region) of the heavy chain. In some embodiments, there is provided an IFN-γ immunocytokine comprising: a) an antibody specifically recognizing a target antigen (e.g., CTLA-4, PD-L1, PD-L2, CD25, HER2, PD-1, CD3, CD4, CD123, or CD8); and b) an IFN-γ or variant thereof (e.g., SEQ ID NO: 18 or 19), wherein the antibody comprises a heavy chain comprising from N-terminus to C-terminus: a VH domain, optionally a CH1 domain, [a first subunit of IFN-γ or variant thereof (e.g., any of SEQ ID NOs: 10⁻¹⁷), optionally a linker (e.g., peptide linker), a second subunit of IFN-γ or variant thereof (e.g., any of SEQ ID NOs: 10⁻¹⁷)] at a hinge region, a CH2 domain, and optionally a CH3 domain. In some embodiments, there is provided an IFN-γ immunocytokine comprising: a) a full-length antibody specifically recognizing a target antigen (e.g., CTLA-4, PD-L1, PD-L2, CD25, HER2, PD-1, CD3, CD4, CD123, or CD8); and b) an IFN-γ or variant thereof (e.g., SEQ ID NO: 18 or 19), wherein both subunits (e.g., any of SEQ ID NOs: 10⁻¹⁷) of the IFN-γ or variant thereof are positioned in tandem (e.g., connected via an optional peptide linker such as any of SEQ ID NOs: 227-229) at the hinge region (e.g., within the hinge region, or between the C-terminus of CH1 and the N-terminus of the hinge region) of a heavy chain of the full-length antibody. In some embodiments, there is provided an IFN-γ immunocytokine comprising: a) a full-length antibody specifically recognizing a target antigen (e.g., CTLA-4, PD-L1, PD-L2, CD25, HER2, PD-1, CD3, CD4, CD123, or CD8); and b) an IFN-γ variant comprising one or more mutations within one or both IFN-γ subunits at a position selected from the group consisting of V5, S20, D21, V22, A23, D24, N25, G26, H111, and Q115 relative to a wildtype IFN-γ subunit comprising the sequence of SEQ ID NO: 10, wherein both subunits of the IFN-γ variant are positioned in tandem (e.g., connected via an optional peptide linker such as any of SEQ ID NOs: 227-229) at the hinge region (e.g., within the hinge region, or between the C-terminus of CH1 and the N-terminus of the hinge region) of a heavy chain of the full-length antibody. In some embodiments, there is provided an IFN-γ immunocytokine comprising: a) a full-length antibody specifically recognizing a target antigen (e.g., CTLA-4, PD-L1, PD-L2, CD25, HER2, PD-1, CD3, CD4, CD123, or CD8); and b) an IFN-γ variant comprising one or more mutations within one or both IFN-γ subunits selected from the group consisting of S20A, D21A, D21K, V22A, A23S, A23E, A23Q, A23V, D24A, D24E, N25A, N25K, and H111D relative to a wildtype IFN-γ subunit comprising the sequence of SEQ ID NO: 10, wherein both subunits of the IFN-γ variant are positioned in tandem (e.g., connected via an optional peptide linker such as any of SEQ ID NOs: 227-229) at the hinge region (e.g., within the hinge region, or between the C-terminus of CH1 and the N-terminus of the hinge region) of a heavy chain of the full-length antibody. In some embodiments, there is provided an IFN-γ immunocytokine comprising: a) a full-length antibody specifically recognizing a target antigen (e.g., CTLA-4, PD-L1, PD-L2, CD25, HER2, PD-1, CD3, CD4, CD123, or CD8); and b) an IFN-γ variant comprising one or more mutations within one or both IFN-γ subunits selected from the group consisting of S20A/D21A, D21K, V22A/A23S, D24A/N25A, A23E/D24E/N25K, A23Q, and A23V relative to a wildtype IFN-γ subunit comprising the sequence of SEQ ID NO: 10, wherein both subunits of the IFN-γ variant are positioned in tandem (e.g., connected via an optional peptide linker such as any of SEQ ID NOs: 227-229) at the hinge region (e.g., within the hinge region, or between the C-terminus of CH1 and the N-terminus of the hinge region) of a heavy chain of the full-length antibody. In some embodiments, there is provided an IFN-γ immunocytokine comprising: a) a full-length antibody specifically recognizing a target antigen (e.g., CTLA-4, PD-L1, PD-L2, CD25, HER2, PD-1, CD3, CD4, CD123, or CD8); and b) an IFN-γ variant, wherein one or both subunits of the IFN-γ variant comprises the sequence of any of SEQ ID NOs: 11-17, wherein both subunits of the IFN-γ variant are positioned in tandem (e.g., connected via an optional peptide linker such as any of SEQ ID NOs: 227-229) at the hinge region (e.g., within the hinge region, or between the C-terminus of CH1 and the N-terminus of the hinge region) of a heavy chain of the full-length antibody. In some embodiments, there is provided an IFN-γ immunocytokine comprising: a) a full-length antibody specifically recognizing a target antigen (e.g., CTLA-4, PD-L1, PD-L2, CD25, HER2, PD-1, CD3, CD4, CD123, or CD8); and b) an IFN-γ variant comprising an A23V mutation within one or both IFN-γ subunits relative to a wildtype IFN-γ subunit comprising the sequence of SEQ ID NO: 10, wherein both subunits of the IFN-γ variant are positioned in tandem (e.g., connected via an optional peptide linker such as any of SEQ ID NOs: 227-229) at the hinge region (e.g., within the hinge region, or between the C-terminus of CH1 and the N-terminus of the hinge region) of a heavy chain of the full-length antibody. In some embodiments, there is provided an IFN-γ immunocytokine comprising: a) a full-length antibody specifically recognizing a target antigen (e.g., CTLA-4, PD-L1, PD-L2, CD25, HER2, PD-1, CD3, CD4, CD123, or CD8); and b) an IFN-γ variant, wherein one or both subunits of the IFN-γ variant comprises the sequence of SEQ ID NO: 13, and wherein both subunits of the IFN-γ variant are positioned in tandem (e.g., connected via an optional peptide linker such as any of SEQ ID NOs: 227-229) at the hinge region (e.g., within the hinge region, or between the C-terminus of CH1 and the N-terminus of the hinge region) of a heavy chain of the full-length antibody. In some embodiments, the two subunits of the IFN-γ or variant thereof are connected by a linker (e.g., any of SEQ ID NOs: 227-229). In some embodiments, there is provided an IFN-γ immunocytokine comprising: a) a full-length antibody specifically recognizing a target antigen (e.g., CTLA-4, PD-L1, PD-L2, CD25, HER2, PD-1, CD3, CD4, CD123, or CD8); and b) an IFN-γ variant comprising the sequence of SEQ ID NO: 19, wherein the IFN-γ variant is positioned at the hinge region (e.g., within the hinge region, or between the C-terminus of CH1 and the N-terminus of the hinge region) of a heavy chain of the full-length antibody. In some embodiments, the activity (binding affinity to corresponding cytokine receptor or subunit thereof, and/or biological activity) of the IFN-γ variant in a free state is no more than about 80% (such as no more than about any of 70%, 60%, 50%, 40%, 30%, 20%, 10%, or 5%) of that of a corresponding wildtype IFN-γ in a free state. In some embodiments, the antigen-binding protein (e.g., antibody or fragment thereof, or antigen-binding fragment-hinge-Fc fusion protein such as ligand/receptor-hinge-Fc fusion protein) is monospecific. In some embodiments, the antigen-binding protein is multispecific (e.g., bispecific). In some embodiments, the parental antigen-binding protein (e.g., antibody such as full-length antibody, or antigen-binding fragment-hinge-Fc fusion protein such as ligand/receptor-hinge-Fc fusion protein) is homodimeric. In some embodiments, the parental antigen-binding protein is heterodimeric. In some embodiments, the antigen-binding protein is an agonist. In some embodiments, the antigen-binding protein is an antagonist. In some embodiments, the hinge region comprises the sequence of any of SEQ ID NOs: 40-47, 50-52, and 55-59.

[0155] In some embodiments, the antigen-binding protein is an anti-HER2 antibody. Thus in some embodiments, there is provided an IFN-γ immunocytokine (“IFN-γ/anti-HER2 immunocytokine”) comprising: a) an antibody (e.g., full-length antibody, heavy chain only antibody, or antigen-binding fragment fused to an Fc domain subunit or portion thereof) specifically recognizing HER2; and b) an IFN-γ or variant thereof (e.g., SEQ ID NO: 18 or 19), wherein the antibody comprises a heavy chain comprising a hinge region (e.g., any of SEQ ID NOs: 40-47, 50-52, and 55-59), and wherein both subunits (e.g., any of SEQ ID NOs: 10⁻¹⁷) of the IFN-γ or variant thereof are positioned in tandem (e.g., connected via an optional peptide linker such as any of SEQ ID NOs: 227-229) at the hinge region (e.g., within the hinge region, or between the C-terminus of CH1 and the N-terminus of the hinge region) of the heavy chain. In some embodiments, there is provided an IFN-γ/anti-HER2 immunocytokine comprising: a) a full-length antibody specifically recognizing HER2; and b) an IFN-γ or variant thereof (e.g., SEQ ID NO: 18 or 19), wherein both subunits (e.g., any of SEQ ID NOs: 10⁻¹⁷) of the IFN-γ or variant thereof are positioned in tandem (e.g., connected via an optional peptide linker such as any of SEQ ID NOs: 227-229) at the hinge region (e.g., any of SEQ ID NOs: 40-47, 50-52, and 55-59)(e.g., within the hinge region, or between the C-terminus of CH1 and the N-terminus of the hinge region) of a heavy chain of the full-length antibody; and wherein the anti-HER2 antibody comprises: i) a VH-CDR1 comprising the sequence of SEQ ID NO: 188; ii) a VH-CDR2 comprising the sequence of SEQ ID NO: 189; iii) a VH-CDR3 comprising the sequence of SEQ ID NO: 190; iv) a VL-CDR1 comprising the sequence of SEQ ID NO: 191; v) a VL-CDR2 comprising the sequence of SEQ ID NO: 192; and vi) a VL-CDR3 comprising the sequence of SEQ ID NO: 193. In some embodiments, the anti-HER2 antibody or antigen binding fragment thereof comprises a VH comprising the sequence of SEQ ID NO: 150 and a VL comprising the sequence of SEQ ID NO: 151. In some embodiments, the parental anti-HER2 antibody comprises two heavy chains each comprising the sequence of SEQ ID NO: 152 or 153, and two light chains each comprising the sequence of SEQ ID NO: 154. In some embodiments, one or both subunits of the IFN-γ variant comprises the sequence of SEQ ID NO: 13. In some embodiments, the IFN-γ variant comprises the sequence of SEQ ID NO: 19. In some embodiments, the heavy chain comprising the IFN-γ variant positioned at the hinge region comprises the sequence of SEQ ID NO: 158. In some embodiments, there is provided an IFN-γ/anti-HER2 immunocytokine comprising: two light chains comprising the sequence of SEQ ID NO: 154, one heavy chain comprising an IFN-γ variant positioned at the hinge region comprising the sequence of SEQ ID NO: 158, and one heavy chain comprises the sequence of SEQ ID NO: 155. In some embodiments, in the presence of binding of the antibody (or antigen-binding fragment) to HER2, the activity (binding affinity to corresponding cytokine receptor or subunit thereof, and/or biological activity) of the IFN-γ cytokine or variant thereof increases at least about 20% (such as at least about any of 30%, 40%, 50%, 60%, 70%, 80%, 90%, 100%, 200%, 300%, 400%, 500%, or more) compared to that in the absence of binding of the antibody (or antigen-binding fragment) to HER2. In some embodiments, in the absence of binding of the antibody (or antigen-binding fragment) to HER2, the activity (binding affinity to corresponding cytokine receptor or subunit thereof, and/or biological activity) of the IFN-γ cytokine or variant thereof positioned at the hinge region of the heavy chain is no more than about 70% (such as no more than about any of 60%, 50%, 40%, 30%, 20%, 10%, 9%, 8%, 7%, 6%, 5%, 4%, 3%, 2%, 1%, 0.9%, 0.8%, 0.7%, 0.6%, 0.5%, 0.4%, 0.3%, 0.2%, 0.1%, or 0%) of that of a corresponding IFN-γ cytokine or variant thereof in a free state. In some embodiments, the antibody is monospecific. In some embodiments, the antibody is multispecific (e.g., bispecific). In some embodiments, the antibody is homodimeric. In some embodiments, the antibody is heterodimeric. In some embodiments, the antibody is an agonist antibody. In some embodiments, the antibody is an antagonist antibody.

[0156] In some embodiments, the antigen-binding protein is an anti-CD3 antibody. Thus in some embodiments, there is provided an IFN-γ immunocytokine (“IFN-γ/anti-CD3 immunocytokine”) comprising: a) an antibody (e.g., full-length antibody, heavy chain only antibody, or antigen-binding fragment fused to an Fc domain subunit or portion thereof) specifically recognizing CD3; and b) an IFN-γ or variant thereof (e.g., SEQ ID NO: 18 or 19), wherein the antibody comprises a heavy chain comprising a hinge region (e.g., any of SEQ ID NOs: 40-47, 50-52, and 55-59), and wherein both subunits (e.g., any of SEQ ID NOs: 10⁻¹⁷) of the IFN-γ or variant thereof are positioned in tandem (e.g., connected via an optional peptide linker such as any of SEQ ID NOs: 227-229) at the hinge region (e.g., within the hinge region, or between the C-terminus of CH1 and the N-terminus of the hinge region) of the heavy chain. In some embodiments, there is provided an IFN-γ/anti-CD3 immunocytokine comprising: a) a full-length antibody specifically recognizing CD3; and b) an IFN-γ or variant thereof (e.g., SEQ ID NO: 18 or 19), wherein both subunits (e.g., any of SEQ ID NO: 10⁻¹⁷) of the IFN-γ or variant thereof are positioned in tandem (e.g., connected via an optional peptide linker such as any of SEQ ID NOs: 227-229) at the hinge region (e.g., any of SEQ ID NOs: 40-47, 50-52, and 55-59)(e.g., within the hinge region, or between the C-terminus of CH1 and the N-terminus of the hinge region) of a heavy chain of the full-length antibody; and wherein the anti-CD3 antibody comprises: i) a VH-CDR1 comprising the sequence of SEQ ID NO: 85; ii) a VH-CDR2 comprising the sequence of SEQ ID NO: 86; iii) a VH-CDR3 comprising the sequence of SEQ ID NO: 87; iv) a VL-CDR1 comprising the sequence of SEQ ID NO: 88; v) a VL-CDR2 comprising the sequence of SEQ ID NO: 89; and vi) a VL-CDR3 comprising the sequence of SEQ ID NO: 90. In some embodiments, the anti-CD3 antibody comprises a VH comprising the sequence of SEQ ID NO: 91 and a VL comprising the sequence of SEQ ID NO: 92. In some embodiments, the parental anti-CD3 antibody comprises two heavy chains each comprising the sequence of SEQ ID NO: 93, and two light chains each comprising the sequence of SEQ ID NO: 94. In some embodiments, one or both subunits of the IFN-γ variant comprises the sequence of SEQ ID NO: 13. In some embodiments, the IFN-γ variant comprises the sequence of SEQ ID NO: 19. In some embodiments, the heavy chain comprising the IFN-γ variant positioned at the hinge region comprises the sequence of SEQ ID NO: 98. In some embodiments, there is provided an IFN-γ/anti-CD3 immunocytokine comprising: two light chains comprising the sequence of SEQ ID NO: 94, one heavy chain comprising an IFN-γ variant positioned at the hinge region comprising the sequence of SEQ ID NO: 98, and one heavy chain comprises the sequence of SEQ ID NO: 95. In some embodiments, in the presence of binding of the antibody (or antigen-binding fragment) to CD3, the activity (binding affinity to corresponding cytokine receptor or subunit thereof, and/or biological activity) of the IFN-γ cytokine or variant thereof increases at least about 20% (such as at least about any of 30%, 40%, 50%, 60%, 70%, 80%, 90%, 100%, 200%, 300%, 400%, 500%, or more) compared to that in the absence of binding of the antibody (or antigen-binding fragment) to CD3. In some embodiments, in the absence of binding of the antibody (or antigen-binding fragment) to CD3, the activity (binding affinity to corresponding cytokine receptor or subunit thereof, and/or biological activity) of the IFN-γ cytokine or variant thereof positioned at the hinge region of the heavy chain is no more than about 70% (such as no more than about any of 60%, 50%, 40%, 30%, 20%, 10%, 9%, 8%, 7%, 6%, 5%, 4%, 3%, 2%, 1%, 0.9%, 0.8%, 0.7%, 0.6%, 0.5%, 0.4%, 0.3%, 0.2%, 0.1%, or 0%) of that of a corresponding IFN-γ cytokine or variant thereof in a free state. In some embodiments, the antibody is monospecific. In some embodiments, the antibody is multispecific (e.g., bispecific). In some embodiments, the antibody is homodimeric. In some embodiments, the antibody is heterodimeric. In some embodiments, the antibody is an agonist antibody. In some embodiments, the antibody is an antagonist antibody.

[0157] In some embodiments, the antibody is an anti-PD-1 antibody. Thus in some embodiments, there is provided an IFN-γ immunocytokine (“IFN-γ/anti-PD-1 immunocytokine”) comprising: a) an antibody (e.g., full-length antibody, heavy chain only antibody, or antigen-binding fragment fused to an Fc domain subunit or portion thereof) specifically recognizing PD-1; and b) an IFN-γ or variant thereof (e.g., SEQ ID NO: 18 or 19), wherein the antibody comprises a heavy chain comprising a hinge region (e.g., any of SEQ ID NOs: 40-47, 50-52, and 55-59), and wherein both subunits (e.g., any of SEQ ID NO: 10⁻¹⁷) of the IFN-γ or variant thereof are positioned in tandem (e.g., connected via an optional peptide linker such as any of SEQ ID NOs: 227-229) at the hinge region (e.g., within the hinge region, or between the C-terminus of CH1 and the N-terminus of the hinge region) of the heavy chain. In some embodiments, there is provided an IFN-γ/anti-PD-1 immunocytokine comprising: a) a full-length antibody specifically recognizing PD-1; and b) an IFN-γ or variant thereof (e.g., SEQ ID NO: 18 or 19), wherein both subunits (e.g., any of SEQ ID NOs: 10⁻¹⁷) of the IFN-γ or variant thereof are positioned in tandem (e.g., connected via an optional peptide linker such as any of SEQ ID NOs: 227-229) at the hinge region (e.g., any of SEQ ID NOs: 40-47, 50-52, and 55-59)(e.g., within the hinge region, or between the C-terminus of CH1 and the N-terminus of the hinge region) of a heavy chain of the full-length antibody; and wherein the anti-PD-1 antibody comprises VH-CDR1, VH-CDR2, and VH-CDR3 of a VH comprising the sequence of SEQ ID NO: 102, and VL-CDR1, VL-CDR2, and VL-CDR3 of a VL comprising the sequence of SEQ ID NO: 103. In some embodiments, the anti-PD-1 antibody comprises a VH comprising the sequence of SEQ ID NO: 102 and a VL comprising the sequence of SEQ ID NO: 103. In some embodiments, the parental anti-PD-1 antibody comprises two heavy chains each comprising the sequence of SEQ ID NO: 104 or 105, and two light chains each comprising the sequence of SEQ ID NO: 106. In some embodiments, one or both subunits of the IFN-γ variant comprises the sequence of SEQ ID NO: 13. In some embodiments, the IFN-γ variant comprises the sequence of SEQ ID NO: 19. In some embodiments, the heavy chain comprising the IFN-γ variant positioned at the hinge region comprises the sequence of SEQ ID NO: 110. In some embodiments, there is provided an IFN-γ/anti-PD-1 immunocytokine comprising: two light chains comprising the sequence of SEQ ID NO: 106, one heavy chain comprising an IFN-γ variant positioned at the hinge region comprising the sequence of SEQ ID NO: 110, and one heavy chain comprises the sequence of SEQ ID NO: 107. In some embodiments, in the presence of binding of the antibody (or antigen-binding fragment) to PD-1, the activity (binding affinity to corresponding cytokine receptor or subunit thereof, and/or biological activity) of the IFN-γ or variant thereof increases at least about 20% (such as at least about any of 30%, 40%, 50%, 60%, 70%, 80%, 90%, 100%, 200%, 300%, 400%, 500%, or more) compared to that in the absence of binding of the antibody to PD-1 (or antigen-binding fragment). In some embodiments, in the absence of binding of the antibody (or antigen-binding fragment) to PD-1, the activity (binding affinity to corresponding cytokine receptor or subunit thereof, and/or biological activity) of the IFN-γ or variant thereof positioned at the hinge region of the heavy chain is no more than about 70% (such as no more than about any of 60%, 50%, 40%, 30%, 20%, 10%, 9%, 8%, 7%, 6%, 5%, 4%, 3%, 2%, 1%, 0.9%, 0.8%, 0.7%, 0.6%, 0.5%, 0.4%, 0.3%, 0.2%, 0.1%, or 0%) of that of a corresponding IFN-γ or variant thereof in a free state. In some embodiments, the antibody is monospecific. In some embodiments, the antibody is multispecific (e.g., bispecific). In some embodiments, the antibody is homodimeric. In some embodiments, the antibody is heterodimeric. In some embodiments, the antibody is an agonist antibody. In some embodiments, the antibody is an antagonist antibody.

[0158] In some embodiments, the antibody is an anti-CD4 antibody. Thus in some embodiments, there is provided an IFN-γ immunocytokine (“IFN-γ/anti-CD4 immunocytokine”) comprising: a) an antibody (e.g., full-length antibody, heavy chain only antibody, or antigen-binding fragment fused to an Fc domain subunit or portion thereof) specifically recognizing CD4; and b) an IFN-γ or variant thereof (e.g., SEQ ID NO: 18 or 19), wherein the antibody comprises a heavy chain comprising a hinge region (e.g., any of SEQ ID NOs: 40-47, 50-52, and 55-59), and wherein both subunits (e.g., any of SEQ ID NO: 10⁻¹⁷) of the IFN-γ or variant thereof are positioned in tandem (e.g., connected via an optional peptide linker such as any of SEQ ID NOs: 227-229) at the hinge region (e.g., within the hinge region, or between the C-terminus of CH1 and the N-terminus of the hinge region) of the heavy chain. In some embodiments, there is provided an IFN-γ/anti-CD4 immunocytokine comprising: a) a full-length antibody specifically recognizing CD4; and b) an IFN-γ or variant thereof (e.g., SEQ ID NO: 18 or 19), wherein both subunits (e.g., any of SEQ ID NO: 10⁻¹⁷) of the IFN-γ or variant thereof are positioned in tandem (e.g., connected via an optional peptide linker such as any of SEQ ID NOs: 227-229) at the hinge region (e.g., any of SEQ ID NOs: 40-47, 50-52, and 55-59)(e.g., within the hinge region, or between the C-terminus of CH1 and the N-terminus of the hinge region) of a heavy chain of the full-length antibody; and wherein the anti-CD4 antibody comprises: i) a VH-CDR1 comprising the sequence of SEQ ID NO: 67; ii) a VH-CDR2 comprising the sequence of SEQ ID NO: 68; iii) a VH-CDR3 comprising the sequence of SEQ ID NO: 69; iv) a VL-CDR1 comprising the sequence of SEQ ID NO: 70; v) a VL-CDR2 comprising the sequence of SEQ ID NO: 71; and vi) a VL-CDR3 comprising the sequence of SEQ ID NO: 72. In some embodiments, the anti-CD4 antibody comprises a VH comprising the sequence of SEQ ID NO: 73 and a VL comprising the sequence of SEQ ID NO: 74. In some embodiments, the parental anti-CD4 antibody comprises two heavy chains each comprising the sequence of SEQ ID NO: 75 or 76, and two light chains each comprising the sequence of SEQ ID NO: 77. In some embodiments, one or both subunits of the IFN-γ variant comprises the sequence of SEQ ID NO: 13. In some embodiments, the IFN-γ variant comprises the sequence of SEQ ID NO: 19. In some embodiments, the heavy chain comprising the IFN-γ variant positioned at the hinge region comprises the sequence of SEQ ID NO: 81. In some embodiments, there is provided an IFN-γ/anti-CD4 immunocytokine comprising: two light chains comprising the sequence of SEQ ID NO: 77, one heavy chain comprising an IFN-γ variant positioned at the hinge region comprising the sequence of SEQ ID NO: 81, and one heavy chain comprises the sequence of SEQ ID NO: 78. In some embodiments, in the presence of binding of the antibody (or antigen-binding fragment) to CD4, the activity (binding affinity to corresponding cytokine receptor or subunit thereof, and/or biological activity) of the IFN-γ or variant thereof increases at least about 20% (such as at least about any of 30%, 40%, 50%, 60%, 70%, 80%, 90%, 100%, 200%, 300%, 400%, 500%, or more) compared to that in the absence of binding of the antibody (or antigen-binding fragment) to CD4. In some embodiments, in the absence of binding of the antibody (or antigen-binding fragment) to CD4, the activity (binding affinity to corresponding cytokine receptor or subunit thereof, and/or biological activity) of the IFN-γ or variant thereof positioned at the hinge region of the heavy chain is no more than about 70% (such as no more than about any of 60%, 50%, 40%, 30%, 20%, 10%, 9%, 8%, 7%, 6%, 5%, 4%, 3%, 2%, %, 0.9%, 0.8%, 0.7%, 0.6%, 0.5%, 0.4%, 0.3%, 0.2%, 0.1%, or 0%) of that of a corresponding IFN-γ or variant thereof in a free state. In some embodiments, the antibody is monospecific. In some embodiments, the antibody is multispecific (e.g., bispecific). In some embodiments, the antibody is homodimeric. In some embodiments, the antibody is heterodimeric. In some embodiments, the antibody is an agonist antibody. In some embodiments, the antibody is an antagonist antibody.

[0159] In some embodiments, the antigen-binding protein is an anti-CD8 antibody. Thus in some embodiments, there is provided an IFN-γ immunocytokine (“IFN-γ/anti-CD8 immunocytokine”) comprising: a) an antibody (e.g., full-length antibody, heavy chain only antibody, or antigen-binding fragment fused to an Fc domain subunit or portion thereof) specifically recognizing CD8; and b) an IFN-γ or variant thereof (e.g., SEQ ID NO: 18 or 19), wherein the antibody comprises a heavy chain comprising a hinge region (e.g., any of SEQ ID NOs: 40-47, 50-52, and 55-59), and wherein both subunits (e.g., any of SEQ ID NO: 10⁻¹⁷) of the IFN-γ or variant thereof are positioned in tandem (e.g., connected via an optional peptide linker such as any of SEQ ID NOs: 227-229) at the hinge region (e.g., within the hinge region, or between the C-terminus of CH1 and the N-terminus of the hinge region) of the heavy chain. In some embodiments, there is provided an IFN-γ/anti-CD8 immunocytokine comprising: a) a full-length antibody specifically recognizing CD8; and b) an IFN-γ or variant thereof (e.g., SEQ ID NO: 18 or 19), wherein both subunits (e.g., any of SEQ ID NO: 10⁻¹⁷) of the IFN-γ or variant thereof are positioned in tandem (e.g., connected via an optional peptide linker such as any of SEQ ID NOs: 227-229) at the hinge region (e.g., any of SEQ ID NOs: 40-47, 50-52, and 55-59)(e.g., within the hinge region, or between the C-terminus of CH1 and the N-terminus of the hinge region) of a heavy chain of the full-length antibody; and wherein the anti-CD8 antibody comprises VH-CDR1, VH-CDR2, and VH-CDR3 of a V_{H} comprising the sequence of SEQ ID NO: 114, and VL-CDR1, VL-CDR2, and VL-CDR3 of a V_{L} comprising the sequence of SEQ ID NO: 115. In some embodiments, the anti-CD8 antibody comprises a VH comprising the sequence of SEQ ID NO: 114 and a VL comprising the sequence of SEQ ID NO: 115. In some embodiments, the parental anti-CD8 antibody comprises two heavy chains each comprising the sequence of SEQ ID NO: 116, and two light chains each comprising the sequence of SEQ ID NO: 117. In some embodiments, one or both subunits of the IFN-γ variant comprises the sequence of SEQ ID NO: 13. In some embodiments, the IFN-γ variant comprises the sequence of SEQ ID NO: 19. In some embodiments, the heavy chain comprising the IFN-γ variant positioned at the hinge region comprises the sequence of SEQ ID NO: 121. In some embodiments, there is provided an IFN-γ/anti-CD8 immunocytokine comprising: two light chains comprising the sequence of SEQ ID NO: 117, one heavy chain comprising an IFN-γ variant positioned at the hinge region comprising the sequence of SEQ ID NO: 121, and one heavy chain comprises the sequence of SEQ ID NO: 118. In some embodiments, in the presence of binding of the antibody (or antigen-binding fragment) to CD8, the activity (binding affinity to corresponding cytokine receptor or subunit thereof, and/or biological activity) of the IFN-γ cytokine or variant thereof increases at least about 20% (such as at least about any of 30%, 40%, 50%, 60%, 70%, 80%, 90%, 100%, 200%, 300%, 400%, 500%, or more) compared to that in the absence of binding of the antibody (or antigen-binding fragment) to CD8. In some embodiments, in the absence of binding of the antibody (or antigen-binding fragment) to CD8, the activity (binding affinity to corresponding cytokine receptor or subunit thereof, and/or biological activity) of the IFN-γ cytokine or variant thereof positioned at the hinge region of the heavy chain is no more than about 70% (such as no more than about any of 60%, 50%, 40%, 30%, 20%, 10%, 9%, 8%, 7%, 6%, 5%, 4%, 3%, 2%, 1%, 0.9%, 0.8%, 0.7%, 0.6%, 0.5%, 0.4%, 0.3%, 0.2%, 0.1%, or 0%) of that of a corresponding IFN-γ cytokine or variant thereof in a free state. In some embodiments, the antibody is monospecific. In some embodiments, the antibody is multispecific (e.g., bispecific). In some embodiments, the antibody is homodimeric. In some embodiments, the antibody is heterodimeric.

[0160] In some embodiments, the antibody is an agonist antibody. In some embodiments, the antibody is an antagonist antibody.

[0161] In some embodiments, the antigen-binding protein is an anti-CTLA-4 antibody. Thus in some embodiments, there is provided an IFN-γ immunocytokine (“IFN-γ/anti-CTLA-4 immunocytokine”) comprising: a) an antibody (e.g., full-length antibody, heavy chain only antibody, or antigen-binding fragment fused to an Fc domain subunit or portion thereof) specifically recognizing CTLA-4; and b) an IFN-γ or variant thereof (e.g., SEQ ID NO: 18 or 19), wherein the antibody comprises a heavy chain comprising a hinge region (e.g., any of SEQ ID NOs: 40-47, 50-52, and 55-59), and wherein both subunits (e.g., any of SEQ ID NO: 10⁻¹⁷) of the IFN-γ or variant thereof are positioned in tandem (e.g., connected via an optional peptide linker such as any of SEQ ID NOs: 227-229) at the hinge region (e.g., within the hinge region, or between the C-terminus of CH1 and the N-terminus of the hinge region) of the heavy chain. In some embodiments, there is provided an IFN-γ/anti-CTLA-4 immunocytokine comprising: a) a full-length antibody specifically recognizing CTLA-4; and b) an IFN-γ or variant thereof (e.g., SEQ ID NO: 18 or 19), wherein both subunits (e.g., any of SEQ ID NO: 10⁻¹⁷) of the IFN-γ or variant thereof are positioned in tandem (e.g., connected via an optional peptide linker such as any of SEQ ID NOs: 227-229) at the hinge region (e.g., any of SEQ ID NOs: 40-47, 50-52, and 55-59)(e.g., within the hinge region, or between the C-terminus of CH1 and the N-terminus of the hinge region) of a heavy chain of the full-length antibody; and wherein the anti-CTLA-4 antibody comprises VH-CDR1, VH-CDR2, and VH-CDR3 of a VH comprising the sequence of SEQ ID NO: 125, and VL-CDR1, VL-CDR2, and VL-CDR3 of a VL comprising the sequence of SEQ ID NO: 126. In some embodiments, the anti-CTLA-4 antibody comprises a VH comprising the sequence of SEQ ID NO: 125 and a VL comprising the sequence of SEQ ID NO: 126. In some embodiments, the parental anti-CTLA-4 antibody comprises two heavy chains each comprising the sequence of SEQ ID NO: 127 or 128, and two light chains each comprising the sequence of SEQ ID NO: 129. In some embodiments, one or both subunits of the IFN-γ variant comprises the sequence of SEQ ID NO: 13. In some embodiments, the IFN-γ variant comprises the sequence of SEQ ID NO: 19. In some embodiments, the heavy chain comprising the IFN-γ variant positioned at the hinge region comprises the sequence of SEQ ID NO: 133. In some embodiments, there is provided an IFN-γ/anti-CTLA-4 immunocytokine comprising: two light chains comprising the sequence of SEQ ID NO: 129, one heavy chain comprising an IFN-γ variant positioned at the hinge region comprising the sequence of SEQ ID NO: 133, and one heavy chain comprises the sequence of SEQ ID NO: 130. In some embodiments, in the presence of binding of the antibody (or antigen-binding fragment) to CTLA-4, the activity (binding affinity to corresponding cytokine receptor or subunit thereof, and/or biological activity) of the IFN-γ cytokine or variant thereof increases at least about 20% (such as at least about any of 30%, 40%, 50%, 60%, 70%, 80%, 90%, 100%, 200%, 300%, 400%, 500%, or more) compared to that in the absence of binding of the antibody (or antigen-binding fragment) to CTLA-4. In some embodiments, in the absence of binding of the antibody (or antigen-binding fragment) to CTLA-4, the activity (binding affinity to corresponding cytokine receptor or subunit thereof, and/or biological activity) of the IFN-γ cytokine or variant thereof positioned at the hinge region of the heavy chain is no more than about 70% (such as no more than about any of 60%, 50%, 40%, 30%, 20%, 10%, 9%, 8%, 7%, 6%, 5%, 4%, 3%, 2%, 1%, 0.9%, 0.8%, 0.7%, 0.6%, 0.5%, 0.4%, 0.3%, 0.2%, 0.1%, or 0%) of that of a corresponding IFN-γ cytokine or variant thereof in a free state. In some embodiments, the antibody is monospecific. In some embodiments, the antibody is multispecific (e.g., bispecific). In some embodiments, the antibody is homodimeric. In some embodiments, the antibody is heterodimeric. In some embodiments, the antibody is an agonist antibody. In some embodiments, the antibody is an antagonist antibody.

[0162] In some embodiments, the antigen-binding protein is an anti-PD-L1 antibody. Thus in some embodiments, there is provided an IFN-γ immunocytokine (“IFN-γ/anti-PD-L1 immunocytokine”) comprising: a) an antibody (e.g., full-length antibody, heavy chain only antibody, or antigen-binding fragment fused to an Fc domain subunit or portion thereof) specifically recognizing PD-L1; and b) an IFN-γ or variant thereof (e.g., SEQ ID NO: 18 or 19), wherein the antibody comprises a heavy chain comprising a hinge region (e.g., any of SEQ ID NOs: 40-47, 50-52, and 55-59), and wherein both subunits (e.g., any of SEQ ID NO: 10⁻¹⁷) of the IFN-γ or variant thereof are positioned in tandem (e.g., connected via an optional peptide linker such as any of SEQ ID NOs: 227-229) at the hinge region (e.g., within the hinge region, or between the C-terminus of CH1 and the N-terminus of the hinge region) of the heavy chain. In some embodiments, there is provided an IFN-γ/anti-PD-L1 immunocytokine comprising: a) a full-length antibody specifically recognizing PD-L1; and b) an IFN-γ or variant thereof (e.g., SEQ ID NO: 18 or 19), wherein both subunits (e.g., any of SEQ ID NO: 10⁻¹⁷) of the IFN-γ or variant thereof are positioned in tandem (e.g., connected via an optional peptide linker such as any of SEQ ID NOs: 227-229) at the hinge region (e.g., any of SEQ ID NOs: 40-47, 50-52, and 55-59)(e.g., within the hinge region, or between the C-terminus of CH1 and the N-terminus of the hinge region) of a heavy chain of the full-length antibody; and wherein the anti-PD-L1 antibody comprises: i) a VH-CDR1 comprising the sequence of SEQ ID NO: 243; ii) a VH-CDR2 comprising the sequence of SEQ ID NO: 244; iii) a VH-CDR3 comprising the sequence of SEQ ID NO: 245; iv) a VL-CDR1 comprising the sequence of SEQ ID NO: 246; v) a VL-CDR2 comprising the sequence of SEQ ID NO: 247; and vi) a VL-CDR3 comprising the sequence of SEQ ID NO: 248. In some embodiments, the anti-PD-L1 antibody comprises a VH comprising the sequence of SEQ ID NO: 137 and a VL comprising the sequence of SEQ ID NO: 138. In some embodiments, the parental anti-PD-L1 antibody comprises two heavy chains each comprising the sequence of SEQ ID NO: 139, and two light chains each comprising the sequence of SEQ ID NO: 140. In some embodiments, the parental anti-PD-L1 antibody comprises two heavy chains each comprising the sequence of SEQ ID NO: 141, and two light chains each comprising the sequence of SEQ ID NO: 142. In some embodiments, one or both subunits of the IFN-γ variant comprises the sequence of SEQ ID NO: 13. In some embodiments, the IFN-γ variant comprises the sequence of SEQ ID NO: 19. In some embodiments, the heavy chain comprising the IFN-γ variant positioned at the hinge region comprises the sequence of SEQ ID NO: 146. In some embodiments, there is provided an IFN-γ/anti-PD-L1 immunocytokine comprising: two light chains comprising the sequence of SEQ ID NO: 140, one heavy chain comprising an IFN-γ variant positioned at the hinge region comprising the sequence of SEQ ID NO: 146, and one heavy chain comprises the sequence of SEQ ID NO: 143. In some embodiments, in the presence of binding of the antibody (or antigen-binding fragment) to PD-L1, the activity (binding affinity to corresponding cytokine receptor or subunit thereof, and/or biological activity) of the IFN-γ cytokine or variant thereof increases at least about 20% (such as at least about any of 30%, 40%, 50%, 60%, 70%, 80%, 90%, 100%, 200%, 300%, 400%, 500%, or more) compared to that in the absence of binding of the antibody (or antigen-binding fragment) to PD-L1. In some embodiments, in the absence of binding of the antibody (or antigen-binding fragment) to PD-L1, the activity (binding affinity to corresponding cytokine receptor or subunit thereof, and/or biological activity) of the IFN-γ cytokine or variant thereof positioned at the hinge region of the heavy chain is no more than about 70% (such as no more than about any of 60%, 50%, 40%, 30%, 20%, 10%, 9%, 8%, 7%, 6%, 5%, 4%, 3%, 2%, 1%, 0.9%, 0.8%, 0.7%, 0.6%, 0.5%, 0.4%, 0.3%, 0.2%, 0.1%, or 0%) of that of a corresponding IFN-γ cytokine or variant thereof in a free state. In some embodiments, the antibody is monospecific. In some embodiments, the antibody is multispecific (e.g., bispecific). In some embodiments, the antibody is homodimeric. In some embodiments, the antibody is heterodimeric.

[0163] In some embodiments, the antigen-binding protein is an anti-CD25 antibody. Thus in some embodiments, there is provided an IFN-γ immunocytokine (“IFN-γ/anti-CD25 immunocytokine”) comprising: a) an antibody (e.g., full-length antibody, heavy chain only antibody, or antigen-binding fragment fused to an Fc domain subunit or portion thereof) specifically recognizing CD25; and b) an IFN-γ or variant thereof (e.g., SEQ ID NO: 18 or 19), wherein the antibody comprises a heavy chain comprising a hinge region (e.g., any of SEQ ID NOs: 40-47, 50-52, and 55-59), and wherein both subunits (e.g., any of SEQ ID NO: 10⁻¹⁷) of the IFN-γ or variant thereof are positioned in tandem (e.g., connected via an optional peptide linker such as any of SEQ ID NOs: 227-229) at the hinge region (e.g., within the hinge region, or between the C-terminus of CH1 and the N-terminus of the hinge region) of the heavy chain. In some embodiments, there is provided an IFN-γ/anti-CD25 immunocytokine comprising: a) a full-length antibody specifically recognizing CD25; and b) an IFN-γ or variant thereof (e.g., SEQ ID NO: 18 or 19), wherein both subunits (e.g., any of SEQ ID NO: 10⁻¹⁷) of the IFN-γ or variant thereof are positioned in tandem (e.g., connected via an optional peptide linker such as any of SEQ ID NOs: 227-229) at the hinge region (e.g., any of SEQ ID NOs: 40-47, 50-52, and 55-59)(e.g., within the hinge region, or between the C-terminus of CH1 and the N-terminus of the hinge region) of a heavy chain of the full-length antibody; and wherein the anti-CD25 antibody comprises VH-CDR1, VH-CDR2, and VH-CDR3 of a VH comprising the sequence of SEQ ID NO: 162, and VL-CDR1, VL-CDR2, and VL-CDR3 of a VL comprising the sequence of SEQ ID NO: 163. In some embodiments, the anti-CD25 antibody comprises a VH comprising the sequence of SEQ ID NO: 162 and a VL comprising the sequence of SEQ ID NO: 163. In some embodiments, the parental anti-CD25 antibody comprises two heavy chains each comprising the sequence of SEQ ID NO: 164, and two light chains each comprising the sequence of SEQ ID NO: 165. In some embodiments, the parental anti-CD25 antibody comprises two heavy chains each comprising the sequence of SEQ ID NO: 166, and two light chains each comprising the sequence of SEQ ID NO: 167. In some embodiments, one or both subunits of the IFN-γ variant comprises the sequence of SEQ ID NO: 13. In some embodiments, the IFN-γ variant comprises the sequence of SEQ ID NO: 19. In some embodiments, the heavy chain comprising the IFN-γ variant positioned at the hinge region comprises the sequence of SEQ ID NO: 171. In some embodiments, there is provided an IFN-γ/anti-CD25 immunocytokine comprising: two light chains comprising the sequence of SEQ ID NO: 165, one heavy chain comprising an IFN-γ variant positioned at the hinge region comprising the sequence of SEQ ID NO: 171, and one heavy chain comprises the sequence of SEQ ID NO: 168. In some embodiments, in the presence of binding of the antibody (or antigen-binding fragment) to CD25, the activity (binding affinity to corresponding cytokine receptor or subunit thereof, and/or biological activity) of the IFN-γ cytokine or variant thereof increases at least about 20% (such as at least about any of 30%, 40%, 50%, 60%, 70%, 80%, 90%, 100%, 200%, 300%, 400%, 500%, or more) compared to that in the absence of binding of the antibody (or antigen-binding fragment) to CD25. In some embodiments, in the absence of binding of the antibody (or antigen-binding fragment) to CD25, the activity (binding affinity to corresponding cytokine receptor or subunit thereof, and/or biological activity) of the IFN-γ cytokine or variant thereof positioned at the hinge region of the heavy chain is no more than about 70% (such as no more than about any of 60%, 50%, 40%, 30%, 20%, 10%, 9%, 8%, 7%, 6%, 5%, 4%, 3%, 2%, 1%, 0.9%, 0.8%, 0.7%, 0.6%, 0.5%, 0.4%, 0.3%, 0.2%, 0.1%, or 0%) of that of a corresponding IFN-γ cytokine or variant thereof in a free state. In some embodiments, the antibody is monospecific. In some embodiments, the antibody is multispecific (e.g., bispecific). In some embodiments, the antibody is homodimeric. In some embodiments, the antibody is heterodimeric. In some embodiments, the antibody is an agonist antibody. In some embodiments, the antibody is an antagonist antibody.

[0164] In some embodiments, the antigen-binding protein is a PD-L2 (e.g., PD-L2 extracellular domain)-hinge-Fc fusion protein. Thus in some embodiments, there is provided an IFN-γ immunocytokine (“IFN-γ/PD-L2-Fc immunocytokine”) comprising: a) a PD-L2-hinge-Fc fusion polypeptide comprising from N′ to C′: a PD-L2 (e.g., SEQ ID NO: 176) specifically recognizing PD-1, a hinge region (e.g., any of SEQ ID NOs: 40-47, 50-52, and 55-59), and an Fc domain subunit or portion thereof; and b) an IFN-γ or variant thereof (e.g., SEQ ID NO: 18 or 19), wherein both subunits (e.g., any of SEQ ID NO: 10⁻¹⁷) of the IFN-γ or variant thereof are positioned in tandem (e.g., connected via an optional peptide linker such as any of SEQ ID NOs: 227-229) at the hinge region (e.g., within the hinge region, or between the C-terminus of PD-L2 and the N-terminus of the hinge region) of the PD-L2-hinge-Fc fusion polypeptide. In some embodiments, the parental PD-L2-hinge-Fc fusion protein comprises two PD-L2-hinge-Fc fusion polypeptides each comprising the sequence of SEQ ID NO: 177. In some embodiments, one or both subunits of the IFN-γ variant comprises the sequence of SEQ ID NO: 13. In some embodiments, the IFN-γ variant comprises the sequence of SEQ ID NO: 19. In some embodiments, the PD-L2-hinge-Fc fusion polypeptide comprising the IFN-γ variant positioned at the hinge region comprises the sequence of SEQ ID NO: 183. In some embodiments, there is provided an IFN-γ/PD-L2-Fc immunocytokine comprising: a PD-L2-hinge-Fc fusion polypeptide comprising an IFN-γ variant positioned at the hinge region comprises the sequence of SEQ ID NO: 183, and a PD-L2-hinge-Fc fusion polypeptide comprises the sequence of SEQ ID NO: 181. In some embodiments, in the presence of binding of the PD-L2 ligand to PD-1, the activity (binding affinity to corresponding cytokine receptor or subunit thereof, and/or biological activity) of the IFN-γ cytokine or variant thereof increases at least about 20% (such as at least about any of 30%, 40%, 50%, 60%, 70%, 80%, 90%, 100%, 200%, 300%, 400%, 500%, or more) compared to that in the absence of binding of the PD-L2 ligand to PD-1. In some embodiments, in the absence of binding of the PD-L2 ligand to PD-1, the activity (binding affinity to corresponding cytokine receptor or subunit thereof, and/or biological activity) of the IFN-γ cytokine or variant thereof positioned at the hinge region is no more than about 70% (such as no more than about any of 60%, 50%, 40%, 30%, 20%, 10%, 9%, 8%, 7%, 6%, 5%, 4%, 3%, 2%, 1%, 0.9%, 0.8%, 0.7%, 0.6%, 0.5%, 0.4%, 0.3%, 0.2%, 0.1%, or 0%) of that of a corresponding IFN-γ cytokine or variant thereof in a free state. In some embodiments, the PD-L2-hinge-Fc fusion protein is monospecific. In some embodiments, the PD-L2-hinge-Fc fusion protein is multispecific (e.g., bispecific). In some embodiments, the PD-L2-hinge-Fc fusion protein is homodimeric. In some embodiments, the PD-L2-hinge-Fc fusion protein is heterodimeric. In some embodiments, the PD-L2 moiety is an agonist that can stimulate or enhance PD-1 signaling. In some embodiments, the PD-L2 moiety is an antagonist that can reduce or block PD-1 signaling.

[0165] In some embodiments, the cytokine or variant thereof is IL-10 or variant thereof. In some embodiments, there is provided an IL-10 immunocytokine comprising: a) an antigen-binding protein (e.g., antibody such as full-length antibody, or antigen-binding fragment-hinge-Fc fusion protein such as ligand/receptor-hinge-Fc fusion protein) specifically recognizing a target antigen (e.g., CTLA-4, PD-L1, PD-L2, CD25, HER2, PD-1, CD3, CD4, CD123, or CD8); and b) an IL-10 or variant thereof (e.g., SEQ ID NO: 27 or 28), wherein the antigen-binding protein comprises an antigen-binding polypeptide (e.g., antibody heavy chain, or antigen-binding fragment-hinge-Fc fusion polypeptide such as ligand/receptor-hinge-Fc fusion polypeptide) comprising from N′ to C′: an antigen-binding fragment (e.g., ligand such as PD-L2 extracellular domain, receptor, VHH, scFv, or VH), a hinge region, and an Fc domain subunit or portion thereof (e.g., CH2+CH3, or CH2 only), and wherein both subunits (e.g., any of SEQ ID NOs: 20-26) of the IL-10 or variant thereof are positioned in tandem (e.g., connected via an optional peptide linker such as any of SEQ ID NOs: 227-229) at (e.g., at the N′ of, at the C′ of, or within) the hinge region. In some embodiments, the antigen-binding protein is an antibody (e.g., full-length antibody) specifically recognizing the target antigen, the antigen-binding polypeptide comprising the hinge region is a heavy chain of the antibody, and both subunits (e.g., any of SEQ ID NOs: 20-26) of the IL-10 or variant thereof are positioned in tandem (e.g., connected via an optional peptide linker such as any of SEQ ID NOs: 227-229) at the hinge region of the heavy chain. In some embodiments, the antigen-binding fragment is a ligand, and the target antigen is a receptor specifically recognized by the ligand. In some embodiments, the antigen-binding fragment is a receptor, and the target antigen is a ligand specifically recognized by the receptor. In some embodiments, there is provided an IL-10 immunocytokine comprising: a) an antibody (e.g., full-length antibody, heavy chain only antibody, or antigen-binding fragment fused to an Fc domain subunit or portion thereof via a hinge region) specifically recognizing a target antigen (e.g., CTLA-4, PD-L1, PD-L2, CD25, HER2, PD-1, CD3, CD4, CD123, or CD8); and b) an IL-10 or variant thereof (e.g., SEQ ID NO: 27 or 28), wherein the antibody comprises a heavy chain comprising a hinge region, and wherein both subunits (e.g., any of SEQ ID NOs: 20-26) of the IL-10 or variant thereof are positioned in tandem (e.g., connected via an optional peptide linker such as any of SEQ ID NOs: 227-229) at the hinge region (e.g., within the hinge region, or between the C-terminus of CH1 and the N-terminus of the hinge region) of the heavy chain. In some embodiments, there is provided an IL-10 immunocytokine comprising: a) an antibody specifically recognizing a target antigen (e.g., CTLA-4, PD-L1, PD-L2, CD25, HER2, PD-1, CD3, CD4, CD123, or CD8); and b) an IL-10 or variant thereof (e.g., SEQ ID NO: 27 or 28), wherein the antibody comprises a heavy chain comprising from N-terminus to C-terminus: a VH domain, optionally a CH1 domain, [a first subunit of IL-10 or variant thereof (e.g., any of SEQ ID NOs: 20-26), optionally a linker (e.g., peptide linker), a second subunit of IL-10 or variant thereof (e.g., any of SEQ ID NOs: 20-26)] at a hinge region, a CH2 domain, and optionally a CH3 domain. In some embodiments, there is provided an IL-10 immunocytokine comprising: a) a full-length antibody specifically recognizing a target antigen (e.g., CTLA-4, PD-L1, PD-L2, CD25, HER2, PD-1, CD3, CD4, CD123, or CD8); and b) an IL-10 or variant thereof (e.g., SEQ ID NO: 27 or 28), wherein both subunits of the IL-10 or variant thereof are positioned in tandem (e.g., connected via an optional peptide linker such as any of SEQ ID NOs: 227-229) at the hinge region (e.g., within the hinge region, or between the C-terminus of CH1 and the N-terminus of the hinge region) of a heavy chain of the full-length antibody. In some embodiments, there is provided an IL-10 immunocytokine comprising: a) a full-length antibody specifically recognizing a target antigen (e.g., CTLA-4, PD-L1, PD-L2, CD25, HER2, PD-1, CD3, CD4, CD123, or CD8); and b) an IL-10 variant comprising one or more mutations within one or both IL-10 subunits at a position selected from the group consisting of N21, M22, R24, D25, L26, R27, D28, A29, F30, S31, R32, H90, and S93 relative to a wildtype IL-10 subunit comprising the sequence of SEQ ID NO: 20, wherein both subunits of the IL-10 variant are positioned in tandem (e.g., connected via an optional peptide linker such as any of SEQ ID NOs: 227-229) at the hinge region (e.g., within the hinge region, or between the C-terminus of CH1 and the N-terminus of the hinge region) of a heavy chain of the full-length antibody. In some embodiments, there is provided an IL-10 immunocytokine comprising: a) a full-length antibody specifically recognizing a target antigen (e.g., CTLA-4, PD-L1, PD-L2, CD25, HER2, PD-1, CD3, CD4, CD123, or CD8); and b) an IL-10 variant comprising one or more mutations within one or both IL-10 subunits selected from the group consisting of R24A, D25A, L26A, R27A, D28A, A29S, F30A, S31A, and R32A relative to a wildtype IL-10 subunit comprising the sequence of SEQ ID NO: 20, wherein both subunits of the IL-10 variant are positioned in tandem (e.g., connected via an optional peptide linker such as any of SEQ ID NOs: 227-229) at the hinge region (e.g., within the hinge region, or between the C-terminus of CH1 and the N-terminus of the hinge region) of a heavy chain of the full-length antibody. In some embodiments, there is provided an IL-10 immunocytokine comprising: a) a full-length antibody specifically recognizing a target antigen (e.g., CTLA-4, PD-L1, PD-L2, CD25, HER2, PD-1, CD3, CD4, CD123, or CD8); and b) an IL-10 variant comprising one or more mutations within one or both IL-10 subunits selected from the group consisting of R24A, D25A/L26A, R27A, D28A/A29S, F30A/S31A, and R32A relative to a wildtype IL-10 subunit comprising the sequence of SEQ ID NO: 20, wherein both subunits of the IL-10 variant are positioned in tandem (e.g., connected via an optional peptide linker such as any of SEQ ID NOs: 227-229) at the hinge region (e.g., within the hinge region, or between the C-terminus of CH1 and the N-terminus of the hinge region) of a heavy chain of the full-length antibody. In some embodiments, there is provided an IL-10 immunocytokine comprising: a) a full-length antibody specifically recognizing a target antigen (e.g., CTLA-4, PD-L1, PD-L2, CD25, HER2, PD-1, CD3, CD4, CD123, or CD8); and b) an IL-10 variant, wherein one or both subunits of the IL-10 variant comprises the sequence of any of SEQ ID NOs: 21-26, and wherein both subunits of the IL-10 variant are positioned in tandem (e.g., connected via an optional peptide linker such as any of SEQ ID NOs: 227-229) at the hinge region (e.g., within the hinge region, or between the C-terminus of CH1 and the N-terminus of the hinge region) of a heavy chain of the full-length antibody. In some embodiments, there is provided an IL-10 immunocytokine comprising: a) a full-length antibody specifically recognizing a target antigen (e.g., CTLA-4, PD-L1, PD-L2, CD25, HER2, PD-1, CD3, CD4, CD123, or CD8); and b) an IL-10 variant comprising an R27A mutation within one or both IL-10 subunits relative to a wildtype IL-10 subunit comprising the sequence of SEQ ID NO: 20, wherein both subunits of the IL-10 variant are positioned in tandem (e.g., connected via an optional peptide linker such as any of SEQ ID NOs: 227-229) at the hinge region (e.g., within the hinge region, or between the C-terminus of CH1 and the N-terminus of the hinge region) of a heavy chain of the full-length antibody. In some embodiments, there is provided an IL-10 immunocytokine comprising: a) a full-length antibody specifically recognizing a target antigen (e.g., CTLA-4, PD-L1, PD-L2, CD25, HER2, PD-1, CD3, CD4, CD123, or CD8); and b) an IL-10 variant, wherein one or both subunits of the IL-10 variant comprises the sequence of SEQ ID NO: 23, and wherein both subunits of the IL-10 variant are positioned in tandem (e.g., connected via an optional peptide linker such as any of SEQ ID NOs: 227-229) at the hinge region (e.g., within the hinge region, or between the C-terminus of CH1 and the N-terminus of the hinge region) of a heavy chain of the full-length antibody. In some embodiments, the two subunits of the IL-10 or variant thereof are connected by a linker. In some embodiments, there is provided an IL-10 immunocytokine comprising: a) a full-length antibody specifically recognizing a target antigen (e.g., CTLA-4, PD-L1, PD-L2, CD25, HER2, PD-1, CD3, CD4, CD123, or CD8); and b) an IL-10 variant comprising the sequence of SEQ ID NO: 28, wherein the IL-10 variant is positioned at the hinge region (e.g., within the hinge region, or between the C-terminus of CH1 and the N-terminus of the hinge region) of a heavy chain of the full-length antibody. In some embodiments, the activity (binding affinity to corresponding cytokine receptor or subunit thereof, and/or biological activity) of the IL-10 variant in a free state is no more than about 80% (such as no more than about any of 70%, 60%, 50%, 40%, 30%, 20%, 10%, or 5%) of that of a corresponding wildtype IL-10 in a free state. In some embodiments, the antigen-binding protein (e.g., antibody or fragment thereof, or antigen-binding fragment-hinge-Fc fusion protein such as ligand/receptor-hinge-Fc fusion protein) is monospecific. In some embodiments, the antigen-binding protein is multispecific (e.g., bispecific). In some embodiments, the parental antigen-binding protein (e.g., antibody such as full-length antibody, or antigen-binding fragment-hinge-Fc fusion protein such as ligand/receptor-hinge-Fc fusion protein) is homodimeric. In some embodiments, the parental antigen-binding protein is heterodimeric. In some embodiments, the antigen-binding protein is an agonist. In some embodiments, the antigen-binding protein is an antagonist. In some embodiments, the hinge region comprises the sequence of any of SEQ ID NOs: 40-47, 50-52, and 55-59.

[0166] In some embodiments, the antigen-binding protein is an anti-HER2 antibody. Thus in some embodiments, there is provided an IL-10 immunocytokine (“IL-10/anti-HER2 immunocytokine”) comprising: a) an antibody (e.g., full-length antibody, heavy chain only antibody, or antigen-binding fragment fused to an Fc domain subunit or portion thereof) specifically recognizing HER2; and b) an IL-10 or variant thereof (e.g., SEQ ID NO: 27 or 28), wherein the antibody comprises a heavy chain comprising a hinge region (e.g., any of SEQ ID NOs: 40-47, 50-52, and 55-59), and wherein both subunits (e.g., any of SEQ ID NOs: 20-26) of the IL-10 or variant thereof are positioned in tandem (e.g., connected via an optional peptide linker such as any of SEQ ID NOs: 227-229) at the hinge region (e.g., within the hinge region, or between the C-terminus of CH1 and the N-terminus of the hinge region) of the heavy chain. In some embodiments, there is provided an IL-10/anti-HER2 immunocytokine comprising: a) a full-length antibody specifically recognizing HER2; and b) an IL-10 or variant thereof (e.g., SEQ ID NO: 27 or 28), wherein both subunits (e.g., any of SEQ ID NOs: 20-26) of the IL-10 or variant thereof are positioned in tandem (e.g., connected via an optional peptide linker such as any of SEQ ID NOs: 227-229) at the hinge region (e.g., any of SEQ ID NOs: 40-47, 50-52, and 55-59)(e.g., within the hinge region, or between the C-terminus of CH1 and the N-terminus of the hinge region) of a heavy chain of the full-length antibody; and wherein the anti-HER2 antibody comprises: i) a VH-CDR1 comprising the sequence of SEQ ID NO: 188; ii) a VH-CDR2 comprising the sequence of SEQ ID NO: 189; iii) a VH-CDR3 comprising the sequence of SEQ ID NO: 190; iv) a VL-CDR1 comprising the sequence of SEQ ID NO: 191; v) a VL-CDR2 comprising the sequence of SEQ ID NO: 192; and vi) a VL-CDR3 comprising the sequence of SEQ ID NO: 193. In some embodiments, the anti-HER2 antibody or antigen binding fragment thereof comprises a VH comprising the sequence of SEQ ID NO: 150 and a VL comprising the sequence of SEQ ID NO: 151. In some embodiments, the parental anti-HER2 antibody comprises two heavy chains each comprising the sequence of SEQ ID NO: 152 or 153, and two light chains each comprising the sequence of SEQ ID NO: 154. In some embodiments, one or both subunits of the IL-10 variant comprises the sequence of SEQ ID NO: 23. In some embodiments, the IL-10 variant comprises the sequence of SEQ ID NO: 28. In some embodiments, the heavy chain comprising the IL-10 variant positioned at the hinge region comprises the sequence of SEQ ID NO: 159. In some embodiments, there is provided an IL-10/anti-HER2 immunocytokine comprising: two light chains comprising the sequence of SEQ ID NO: 154, one heavy chain comprising an IL-10 variant positioned at the hinge region comprising the sequence of SEQ ID NO: 159, and one heavy chain comprises the sequence of SEQ ID NO: 155. In some embodiments, in the presence of binding of the antibody (or antigen-binding fragment) to HER2, the activity (binding affinity to corresponding cytokine receptor or subunit thereof, and/or biological activity) of the IL-10 cytokine or variant thereof increases at least about 20% (such as at least about any of 30%, 40%, 50%, 60%, 70%, 80%, 90%, 100%, 200%, 300%, 400%, 500%, or more) compared to that in the absence of binding of the antibody (or antigen-binding fragment) to HER2. In some embodiments, in the absence of binding of the antibody (or antigen-binding fragment) to HER2, the activity (binding affinity to corresponding cytokine receptor or subunit thereof, and/or biological activity) of the IL-10 cytokine or variant thereof positioned at the hinge region of the heavy chain is no more than about 70% (such as no more than about any of 60%, 50%, 40%, 30%, 20%, 10%, 9%, 8%, 7%, 6%, 5%, 4%, 3%, 2%, 1%, 0.9%, 0.8%, 0.7%, 0.6%, 0.5%, 0.4%, 0.3%, 0.2%, 0.1%, or 0%) of that of a corresponding IL-10 cytokine or variant thereof in a free state. In some embodiments, the antibody is monospecific. In some embodiments, the antibody is multispecific (e.g., bispecific). In some embodiments, the antibody is homodimeric. In some embodiments, the antibody is heterodimeric. In some embodiments, the antibody is an agonist antibody. In some embodiments, the antibody is an antagonist antibody.

[0167] In some embodiments, the antigen-binding protein is an anti-CD3 antibody. Thus in some embodiments, there is provided an IL-10 immunocytokine (“IL-10/anti-CD3 immunocytokine”) comprising: a) an antibody (e.g., full-length antibody, heavy chain only antibody, or antigen-binding fragment fused to an Fc domain subunit or portion thereof) specifically recognizing CD3; and b) an IL-10 or variant thereof (e.g., SEQ ID NO: 27 or 28), wherein the antibody comprises a heavy chain comprising a hinge region (e.g., any of SEQ ID NOs: 40-47, 50-52, and 55-59), and wherein both subunits (e.g., any of SEQ ID NOs: 20-26) of the IL-10 or variant thereof are positioned in tandem (e.g., connected via an optional peptide linker such as any of SEQ ID NOs: 227-229) at the hinge region (e.g., within the hinge region, or between the C-terminus of CH1 and the N-terminus of the hinge region) of the heavy chain. In some embodiments, there is provided an IL-10/anti-CD3 immunocytokine comprising: a) a full-length antibody specifically recognizing CD3; and b) an IL-10 or variant thereof (e.g., SEQ ID NO: 27 or 28), wherein both subunits (e.g., any of SEQ ID NOs: 20-26) of the IL-10 or variant thereof are positioned in tandem (e.g., connected via an optional peptide linker such as any of SEQ ID NOs: 227-229) at the hinge region (e.g., any of SEQ ID NOs: 40-47, 50-52, and 55-59)(e.g., within the hinge region, or between the C-terminus of CH1 and the N-terminus of the hinge region) of a heavy chain of the full-length antibody; and wherein the anti-CD3 antibody comprises: i) a VH-CDR1 comprising the sequence of SEQ ID NO: 85; ii) a VH-CDR2 comprising the sequence of SEQ ID NO: 86; iii) a VH-CDR3 comprising the sequence of SEQ ID NO: 87; iv) a VL-CDR1 comprising the sequence of SEQ ID NO: 88; v) a VL-CDR2 comprising the sequence of SEQ ID NO: 89; and vi) a VL-CDR3 comprising the sequence of SEQ ID NO: 90. In some embodiments, the anti-CD3 antibody comprises a VH comprising the sequence of SEQ ID NO: 91 and a VL comprising the sequence of SEQ ID NO: 92. In some embodiments, the parental anti-CD3 antibody comprises two heavy chains each comprising the sequence of SEQ ID NO: 93, and two light chains each comprising the sequence of SEQ ID NO: 94. In some embodiments, one or both subunits of the IL-10 variant comprises the sequence of SEQ ID NO: 23. In some embodiments, the IL-10 variant comprises the sequence of SEQ ID NO: 28. In some embodiments, the heavy chain comprising the IL-10 variant positioned at the hinge region comprises the sequence of SEQ ID NO: 99. In some embodiments, there is provided an IL-10/anti-CD3 immunocytokine comprising: two light chains comprising the sequence of SEQ ID NO: 94, one heavy chain comprising an IL-10 variant positioned at the hinge region comprising the sequence of SEQ ID NO: 99, and one heavy chain comprises the sequence of SEQ ID NO: 95. In some embodiments, in the presence of binding of the antibody (or antigen-binding fragment) to CD3, the activity (binding affinity to corresponding cytokine receptor or subunit thereof, and/or biological activity) of the IL-10 cytokine or variant thereof increases at least about 20% (such as at least about any of 30%, 40%, 50%, 60%, 70%, 80%, 90%, 100%, 200%, 300%, 400%, 500%, or more) compared to that in the absence of binding of the antibody (or antigen-binding fragment) to CD3. In some embodiments, in the absence of binding of the antibody (or antigen-binding fragment) to CD3, the activity (binding affinity to corresponding cytokine receptor or subunit thereof, and/or biological activity) of the IL-10 cytokine or variant thereof positioned at the hinge region of the heavy chain is no more than about 70% (such as no more than about any of 60%, 50%, 40%, 30%, 20%, 10%, 9%, 8%, 7%, 6%, 5%, 4%, 3%, 2%, 1%, 0.9%, 0.8%, 0.7%, 0.6%, 0.5%, 0.4%, 0.3%, 0.2%, 0.1%, or 0%) of that of a corresponding IL-10 cytokine or variant thereof in a free state. In some embodiments, the antibody is monospecific. In some embodiments, the antibody is multispecific (e.g., bispecific). In some embodiments, the antibody is homodimeric. In some embodiments, the antibody is heterodimeric.

[0168] In some embodiments, the antibody is an agonist antibody. In some embodiments, the antibody is an antagonist antibody.

[0169] In some embodiments, the antibody is an anti-PD-1 antibody. Thus in some embodiments, there is provided an IL-10 immunocytokine (“IL-10/anti-PD-1 immunocytokine”) comprising: a) an antibody (e.g., full-length antibody, heavy chain only antibody, or antigen-binding fragment fused to an Fc domain subunit or portion thereof) specifically recognizing PD-1; and b) an IL-10 or variant thereof (e.g., SEQ ID NO: 27 or 28), wherein the antibody comprises a heavy chain comprising a hinge region (e.g., any of SEQ ID NOs: 40-47, 50-52, and 55-59), and wherein both subunits (e.g., any of SEQ ID NOs: 20-26) of the IL-10 or variant thereof are positioned in tandem (e.g., connected via an optional peptide linker such as any of SEQ ID NOs: 227-229) at the hinge region (e.g., within the hinge region, or between the C-terminus of CH1 and the N-terminus of the hinge region) of the heavy chain. In some embodiments, there is provided an IL-10 immunocytokine comprising: a) a full-length antibody specifically recognizing PD-1; and b) an IL-10 or variant thereof (e.g., SEQ ID NO: 27 or 28), wherein both subunits (e.g., any of SEQ ID NOs: 20-26) of the IL-10 or variant thereof are positioned in tandem (e.g., connected via an optional peptide linker such as any of SEQ ID NOs: 227-229) at the hinge region (e.g., any of SEQ ID NOs: 40-47, 50-52, and 55-59)(e.g., within the hinge region, or between the C-terminus of CH1 and the N-terminus of the hinge region) of a heavy chain of the full-length antibody; and wherein the anti-PD-1 antibody comprises VH-CDR1, VH-CDR2, and VH-CDR3 of a VH comprising the sequence of SEQ ID NO: 102, and VL-CDR1, VL-CDR2, and VL-CDR3 of a VL comprising the sequence of SEQ ID NO: 103. In some embodiments, the anti-PD-1 antibody comprises a VH comprising the sequence of SEQ ID NO: 102 and a VL comprising the sequence of SEQ ID NO: 103. In some embodiments, the parental anti-PD-1 antibody comprises two heavy chains each comprising the sequence of SEQ ID NO: 104 or 105, and two light chains each comprising the sequence of SEQ ID NO: 106. In some embodiments, one or both subunits of the IL-10 variant comprises the sequence of SEQ ID NO: 23. In some embodiments, the IL-10 variant comprises the sequence of SEQ ID NO: 28. In some embodiments, the heavy chain comprising the IL-10 variant positioned at the hinge region comprises the sequence of SEQ ID NO: 111. In some embodiments, there is provided an IL-10/anti-PD-1 immunocytokine comprising: two light chains comprising the sequence of SEQ ID NO: 106, one heavy chain comprising an IL-10 variant positioned at the hinge region comprising the sequence of SEQ ID NO: 111, and one heavy chain comprises the sequence of SEQ ID NO: 107. In some embodiments, in the presence of binding of the antibody (or antigen-binding fragment) to PD-1, the activity (binding affinity to corresponding cytokine receptor or subunit thereof, and/or biological activity) of the IL-10 or variant thereof increases at least about 20% (such as at least about any of 30%, 40%, 50%, 60%, 70%, 80%, 90%, 100%, 200%, 300%, 400%, 500%, or more) compared to that in the absence of binding of the antibody (or antigen-binding fragment) to PD-1. In some embodiments, in the absence of binding of the antibody (or antigen-binding fragment) to PD-1, the activity (binding affinity to corresponding cytokine receptor or subunit thereof, and/or biological activity) of the IL-10 or variant thereof positioned at the hinge region of the heavy chain is no more than about 70% (such as no more than about any of 60%, 50%, 40%, 30%, 20%, 10%, 9%, 8%, 7%, 6%, 5%, 4%, 3%, 2%, 1%, 0.9%, 0.8%, 0.7%, 0.6%, 0.5%, 0.4%, 0.3%, 0.2%, 0.1%, or 0%) of that of a corresponding IL-10 or variant thereof in a free state. In some embodiments, the antibody is monospecific. In some embodiments, the antibody is multispecific (e.g., bispecific). In some embodiments, the antibody is homodimeric. In some embodiments, the antibody is heterodimeric.

[0170] In some embodiments, the antibody is an agonist antibody. In some embodiments, the antibody is an antagonist antibody.

[0171] In some embodiments, the antibody is an anti-CD4 antibody. Thus in some embodiments, there is provided an IL-10 immunocytokine (“IL-10/anti-CD4 immunocytokine”) comprising: a) an antibody (e.g., full-length antibody, heavy chain only antibody, or antigen-binding fragment fused to an Fc domain subunit or portion thereof) specifically recognizing CD4; and b) an IL-10 or variant thereof (e.g., SEQ ID NO: 27 or 28), wherein the antibody comprises a heavy chain comprising a hinge region (e.g., any of SEQ ID NOs: 40-47, 50-52, and 55-59), and wherein both subunits (e.g., any of SEQ ID NOs: 20-26) of the IL-10 or variant thereof are positioned in tandem (e.g., connected via an optional peptide linker such as any of SEQ ID NOs: 227-229) at the hinge region (e.g., within the hinge region, or between the C-terminus of CH1 and the N-terminus of the hinge region) of the heavy chain. In some embodiments, there is provided an IL-10/anti-CD4 immunocytokine comprising: a) a full-length antibody specifically recognizing CD4; and b) an IL-10 or variant thereof (e.g., SEQ ID NO: 27 or 28), wherein both subunits (e.g., any of SEQ ID NOs: 20-26) of the IL-10 or variant thereof are positioned in tandem (e.g., connected via an optional peptide linker such as any of SEQ ID NOs: 227-229) at the hinge region (e.g., any of SEQ ID NOs: 40-47, 50-52, and 55-59)(e.g., within the hinge region, or between the C-terminus of CH1 and the N-terminus of the hinge region) of a heavy chain of the full-length antibody; and wherein the anti-CD4 antibody comprises: i) a VH-CDR1 comprising the sequence of SEQ ID NO: 67; ii) a VH-CDR2 comprising the sequence of SEQ ID NO: 68; iii) a VH-CDR3 comprising the sequence of SEQ ID NO: 69; iv) a VL-CDR1 comprising the sequence of SEQ ID NO: 70; v) a VL-CDR2 comprising the sequence of SEQ ID NO: 71; and vi) a VL-CDR3 comprising the sequence of SEQ ID NO: 72. In some embodiments, the anti-CD4 antibody comprises a VH comprising the sequence of SEQ ID NO: 73 and a VL comprising the sequence of SEQ ID NO: 74. In some embodiments, the parental anti-CD4 antibody comprises two heavy chains each comprising the sequence of SEQ ID NO: 75 or 76, and two light chains each comprising the sequence of SEQ ID NO: 77. In some embodiments, one or both subunits of the IL-10 variant comprises the sequence of SEQ ID NO: 23. In some embodiments, the IL-10 variant comprises the sequence of SEQ ID NO: 28. In some embodiments, the heavy chain comprising the IL-10 variant positioned at the hinge region comprises the sequence of SEQ ID NO: 82. In some embodiments, there is provided an IL-10/anti-CD4 immunocytokine comprising: two light chains comprising the sequence of SEQ ID NO: 77, one heavy chain comprising an IL-10 variant positioned at the hinge region comprising the sequence of SEQ ID NO: 82, and one heavy chain comprises the sequence of SEQ ID NO: 78. In some embodiments, in the presence of binding of the antibody (or antigen-binding fragment) to CD4, the activity (binding affinity to corresponding cytokine receptor or subunit thereof, and/or biological activity) of the IL-10 or variant thereof increases at least about 20% (such as at least about any of 30%, 40%, 50%, 60%, 70%, 80%, 90%, 100%, 200%, 300%, 400%, 500%, or more) compared to that in the absence of binding of the antibody (or antigen-binding fragment) to CD4. In some embodiments, in the absence of binding of the antibody (or antigen-binding fragment) to CD4, the activity (binding affinity to corresponding cytokine receptor or subunit thereof, and/or biological activity) of the IL-10 or variant thereof positioned at the hinge region of the heavy chain is no more than about 70% (such as no more than about any of 60%, 50%, 40%, 30%, 20%, 10%, 9%, 8%, 7%, 6%, 5%, 4%, 3%, 2%, 1%, 0.9%, 0.8%, 0.7%, 0.6%, 0.5%, 0.4%, 0.3%, 0.2%, 0.1%, or 0%) of that of a corresponding IL-10 or variant thereof in a free state. In some embodiments, the antibody is monospecific. In some embodiments, the antibody is multispecific (e.g., bispecific). In some embodiments, the antibody is homodimeric. In some embodiments, the antibody is heterodimeric.

[0172] In some embodiments, the antibody is an agonist antibody. In some embodiments, the antibody is an antagonist antibody.

[0173] In some embodiments, the antigen-binding protein is an anti-CD8 antibody. Thus in some embodiments, there is provided an IL-10 immunocytokine (“IL-10/anti-CD8 immunocytokine”) comprising: a) an antibody (e.g., full-length antibody, heavy chain only antibody, or antigen-binding fragment fused to an Fc domain subunit or portion thereof) specifically recognizing CD8; and b) an IL-10 or variant thereof (e.g., SEQ ID NO: 27 or 28), wherein the antibody comprises a heavy chain comprising a hinge region (e.g., any of SEQ ID NOs: 40-47, 50-52, and 55-59), and wherein both subunits (e.g., any of SEQ ID NOs: 20-26) of the IL-10 or variant thereof are positioned in tandem (e.g., connected via an optional peptide linker such as any of SEQ ID NOs: 227-229) at the hinge region (e.g., within the hinge region, or between the C-terminus of CH1 and the N-terminus of the hinge region) of the heavy chain. In some embodiments, there is provided an IL-10/anti-CD8 immunocytokine comprising: a) a full-length antibody specifically recognizing CD8; and b) an IL-10 or variant thereof (e.g., SEQ ID NO: 27 or 28), wherein both subunits (e.g., any of SEQ ID NOs: 20-26) of the IL-10 or variant thereof are positioned in tandem (e.g., connected via an optional peptide linker such as any of SEQ ID NOs: 227-229) at the hinge region (e.g., any of SEQ ID NOs: 40-47, 50-52, and 55-59)(e.g., within the hinge region, or between the C-terminus of CH1 and the N-terminus of the hinge region) of a heavy chain of the full-length antibody; and wherein the anti-CD8 antibody comprises VH-CDR1, VH-CDR2, and VH-CDR3 of a VH comprising the sequence of SEQ ID NO: 114, and VL-CDR1, VL-CDR2, and VL-CDR3 of a VL comprising the sequence of SEQ ID NO: 115. In some embodiments, the anti-CD8 antibody comprises a VH comprising the sequence of SEQ ID NO: 114 and a VL comprising the sequence of SEQ ID NO: 115. In some embodiments, the parental anti-CD8 antibody comprises two heavy chains each comprising the sequence of SEQ ID NO: 116, and two light chains each comprising the sequence of SEQ ID NO: 117. In some embodiments, one or both subunits of the IL-10 variant comprises the sequence of SEQ ID NO: 23. In some embodiments, the IL-10 variant comprises the sequence of SEQ ID NO: 28. In some embodiments, the heavy chain comprising the IL-10 variant positioned at the hinge region comprises the sequence of SEQ ID NO: 122. In some embodiments, there is provided an IL-10/anti-CD8 immunocytokine comprising: two light chains comprising the sequence of SEQ ID NO: 117, one heavy chain comprising an IL-10 variant positioned at the hinge region comprising the sequence of SEQ ID NO: 122, and one heavy chain comprises the sequence of SEQ ID NO: 118. In some embodiments, in the presence of binding of the antibody (or antigen-binding fragment) to CD8, the activity (binding affinity to corresponding cytokine receptor or subunit thereof, and/or biological activity) of the IL-10 cytokine or variant thereof increases at least about 20% (such as at least about any of 30%, 40%, 50%, 60%, 70%, 80%, 90%, 100%, 200%, 300%, 400%, 500%, or more) compared to that in the absence of binding of the antibody (or antigen-binding fragment) to CD8. In some embodiments, in the absence of binding of the antibody (or antigen-binding fragment) to CD8, the activity (binding affinity to corresponding cytokine receptor or subunit thereof, and/or biological activity) of the IL-10 cytokine or variant thereof positioned at the hinge region of the heavy chain is no more than about 70% (such as no more than about any of 60%, 50%, 40%, 30%, 20%, 10%, 9%, 8%, 7%, 6%, 5%, 4%, 3%, 2%, 1%, 0.9%, 0.8%, 0.7%, 0.6%, 0.5%, 0.4%, 0.3%, 0.2%, 0.1%, or 0%) of that of a corresponding IL-10 cytokine or variant thereof in a free state. In some embodiments, the antibody is monospecific. In some embodiments, the antibody is multispecific (e.g., bispecific). In some embodiments, the antibody is homodimeric. In some embodiments, the antibody is heterodimeric.

[0174] In some embodiments, the antibody is an agonist antibody. In some embodiments, the antibody is an antagonist antibody.

[0175] In some embodiments, the antigen-binding protein is an anti-CTLA-4 antibody. Thus in some embodiments, there is provided an IL-10 immunocytokine (“IL-10/anti-CTLA-4 immunocytokine”) comprising: a) an antibody (e.g., full-length antibody, heavy chain only antibody, or antigen-binding fragment fused to an Fc domain subunit or portion thereof) specifically recognizing CTLA-4; and b) an IL-10 or variant thereof (e.g., SEQ ID NO: 27 or 28), wherein the antibody comprises a heavy chain comprising a hinge region (e.g., any of SEQ ID NOs: 40-47, 50-52, and 55-59), and wherein both subunits (e.g., any of SEQ ID NOs: 20-26) of the IL-10 or variant thereof are positioned in tandem (e.g., connected via an optional peptide linker such as any of SEQ ID NOs: 227-229) at the hinge region (e.g., within the hinge region, or between the C-terminus of CH1 and the N-terminus of the hinge region) of the heavy chain. In some embodiments, there is provided an IL-10/anti-CTLA-4 immunocytokine comprising: a) a full-length antibody specifically recognizing CTLA-4; and b) an IL-10 or variant thereof (e.g., SEQ ID NO: 27 or 28), wherein both subunits (e.g., any of SEQ ID NOs: 20-26) of the IL-10 or variant thereof are positioned in tandem (e.g., connected via an optional peptide linker such as any of SEQ ID NOs: 227-229) at the hinge region (e.g., any of SEQ ID NOs: 40-47, 50-52, and 55-59)(e.g., within the hinge region, or between the C-terminus of CH1 and the N-terminus of the hinge region) of a heavy chain of the full-length antibody; and wherein the anti-CTLA-4 antibody comprises VH-CDR1, VH-CDR2, and VH-CDR3 of a VH comprising the sequence of SEQ ID NO: 125, and VL-CDR1, VL-CDR2, and VL-CDR3 of a VL comprising the sequence of SEQ ID NO: 126. In some embodiments, the anti-CTLA-4 antibody comprises a VH comprising the sequence of SEQ ID NO: 125 and a VL comprising the sequence of SEQ ID NO: 126. In some embodiments, the parental anti-CTLA-4 antibody comprises two heavy chains each comprising the sequence of SEQ ID NO: 127 or 128, and two light chains each comprising the sequence of SEQ ID NO: 129. In some embodiments, one or both subunits of the IL-10 variant comprises the sequence of SEQ ID NO: 23. In some embodiments, the IL-10 variant comprises the sequence of SEQ ID NO: 28. In some embodiments, the heavy chain comprising the IL-10 variant positioned at the hinge region comprises the sequence of SEQ ID NO: 134. In some embodiments, there is provided an IL-10/anti-CTLA-4 immunocytokine comprising: two light chains comprising the sequence of SEQ ID NO: 129, one heavy chain comprising an IL-10 variant positioned at the hinge region comprising the sequence of SEQ ID NO: 134, and one heavy chain comprises the sequence of SEQ ID NO: 130. In some embodiments, in the presence of binding of the antibody (or antigen-binding fragment) to CTLA-4, the activity (binding affinity to corresponding cytokine receptor or subunit thereof, and/or biological activity) of the IL-10 cytokine or variant thereof increases at least about 20% (such as at least about any of 30%, 40%, 50%, 60%, 70%, 80%, 90%, 100%, 200%, 300%, 400%, 500%, or more) compared to that in the absence of binding of the antibody (or antigen-binding fragment) to CTLA-4. In some embodiments, in the absence of binding of the antibody (or antigen-binding fragment) to CTLA-4, the activity (binding affinity to corresponding cytokine receptor or subunit thereof, and/or biological activity) of the IL-10 cytokine or variant thereof positioned at the hinge region of the heavy chain is no more than about 70% (such as no more than about any of 60%, 50%, 40%, 30%, 20%, 10%, 9%, 8%, 7%, 6%, 5%, 4%, 3%, 2%, 1%, 0.9%, 0.8%, 0.7%, 0.6%, 0.5%, 0.4%, 0.3%, 0.2%, 0.1%, or 0%) of that of a corresponding IL-10 cytokine or variant thereof in a free state. In some embodiments, the antibody is monospecific. In some embodiments, the antibody is multispecific (e.g., bispecific). In some embodiments, the antibody is homodimeric. In some embodiments, the antibody is heterodimeric. In some embodiments, the antibody is an agonist antibody. In some embodiments, the antibody is an antagonist antibody.

[0176] In some embodiments, the antigen-binding protein is an anti-PD-L1 antibody. Thus in some embodiments, there is provided an IL-10 immunocytokine (“IL-10/anti-PD-L1 immunocytokine”) comprising: a) an antibody (e.g., full-length antibody, heavy chain only antibody, or antigen-binding fragment fused to an Fc domain subunit or portion thereof) specifically recognizing PD-L1; and b) an IL-10 or variant thereof (e.g., SEQ ID NO: 27 or 28), wherein the antibody comprises a heavy chain comprising a hinge region (e.g., any of SEQ ID NOs: 40-47, 50-52, and 55-59), and wherein both subunits (e.g., any of SEQ ID NOs: 20-26) of the IL-10 or variant thereof are positioned in tandem (e.g., connected via an optional peptide linker such as any of SEQ ID NOs: 227-229) at the hinge region (e.g., within the hinge region, or between the C-terminus of CH1 and the N-terminus of the hinge region) of the heavy chain. In some embodiments, there is provided an IL-10/anti-PD-L1 immunocytokine comprising: a) a full-length antibody specifically recognizing PD-L1; and b) an IL-10 or variant thereof (e.g., SEQ ID NO: 27 or 28), wherein both subunits (e.g., any of SEQ ID NOs: 20-26) of the IL-10 or variant thereof are positioned in tandem (e.g., connected via an optional peptide linker such as any of SEQ ID NOs: 227-229) at the hinge region (e.g., any of SEQ ID NOs: 40-47, 50-52, and 55-59)(e.g., within the hinge region, or between the C-terminus of CH1 and the N-terminus of the hinge region) of a heavy chain of the full-length antibody; and wherein the anti-PD-L1 antibody comprises: i) a VH-CDR1 comprising the sequence of SEQ ID NO: 243; ii) a VH-CDR2 comprising the sequence of SEQ ID NO: 244; iii) a VH-CDR3 comprising the sequence of SEQ ID NO: 245; iv) a VL-CDR1 comprising the sequence of SEQ ID NO: 246; v) a VL-CDR2 comprising the sequence of SEQ ID NO: 247; and vi) a VL-CDR3 comprising the sequence of SEQ ID NO: 248. In some embodiments, the anti-PD-L1 antibody comprises a VH comprising the sequence of SEQ ID NO: 137 and a VL comprising the sequence of SEQ ID NO: 138. In some embodiments, the parental anti-PD-L1 antibody comprises two heavy chains each comprising the sequence of SEQ ID NO: 139, and two light chains each comprising the sequence of SEQ ID NO: 140. In some embodiments, the parental anti-PD-L1 antibody comprises two heavy chains each comprising the sequence of SEQ ID NO: 141, and two light chains each comprising the sequence of SEQ ID NO: 142. In some embodiments, one or both subunits of the IL-10 variant comprises the sequence of SEQ ID NO: 23. In some embodiments, the IL-10 variant comprises the sequence of SEQ ID NO: 28. In some embodiments, the heavy chain comprising the IL-10 variant positioned at the hinge region comprises the sequence of SEQ ID NO: 147. In some embodiments, there is provided an IL-10/anti-PD-L1 immunocytokine comprising: two light chains comprising the sequence of SEQ ID NO: 140, one heavy chain comprising an IL-10 variant positioned at the hinge region comprising the sequence of SEQ ID NO: 147, and one heavy chain comprises the sequence of SEQ ID NO: 143. In some embodiments, in the presence of binding of the antibody (or antigen-binding fragment) to PD-L1, the activity (binding affinity to corresponding cytokine receptor or subunit thereof, and/or biological activity) of the IL-10 cytokine or variant thereof increases at least about 20% (such as at least about any of 30%, 40%, 50%, 60%, 70%, 80%, 90%, 100%, 200%, 300%, 400%, 500%, or more) compared to that in the absence of binding of the antibody (or antigen-binding fragment) to PD-L1. In some embodiments, in the absence of binding of the antibody (or antigen-binding fragment) to PD-L1, the activity (binding affinity to corresponding cytokine receptor or subunit thereof, and/or biological activity) of the IL-10 cytokine or variant thereof positioned at the hinge region of the heavy chain is no more than about 70% (such as no more than about any of 60%, 50%, 40%, 30%, 20%, 10%, 9%, 8%, 7%, 6%, 5%, 4%, 3%, 2%, 1%, 0.9%, 0.8%, 0.7%, 0.6%, 0.5%, 0.4%, 0.3%, 0.2%, 0.1%, or 0%) of that of a corresponding IL-10 cytokine or variant thereof in a free state. In some embodiments, the antibody is monospecific. In some embodiments, the antibody is multispecific (e.g., bispecific). In some embodiments, the antibody is homodimeric. In some embodiments, the antibody is heterodimeric.

[0177] In some embodiments, the antigen-binding protein is an anti-CD25 antibody. Thus in some embodiments, there is provided an IL-10 immunocytokine (“IL-10/anti-CD25 immunocytokine”) comprising: a) an antibody (e.g., full-length antibody, heavy chain only antibody, or antigen-binding fragment fused to an Fc domain subunit or portion thereof) specifically recognizing CD25; and b) an IL-10 or variant thereof (e.g., SEQ ID NO: 27 or 28), wherein the antibody comprises a heavy chain comprising a hinge region (e.g., any of SEQ ID NOs: 40-47, 50-52, and 55-59), and wherein both subunits (e.g., any of SEQ ID NOs: 20-26) of the IL-10 or variant thereof are positioned in tandem (e.g., connected via an optional peptide linker such as any of SEQ ID NOs: 227-229) at the hinge region (e.g., within the hinge region, or between the C-terminus of CH1 and the N-terminus of the hinge region) of the heavy chain, or between the C-terminus of CH1 and the N-terminus of the hinge region) of the heavy chain. In some embodiments, there is provided an IL-10/anti-CD25 immunocytokine comprising: a) a full-length antibody specifically recognizing CD25; and b) an IL-10 or variant thereof (e.g., SEQ ID NO: 27 or 28), wherein both subunits (e.g., any of SEQ ID NOs: 20-26) of the IL-10 or variant thereof are positioned in tandem (e.g., connected via an optional peptide linker such as any of SEQ ID NOs: 227-229) at the hinge region (e.g., any of SEQ ID NOs: 40-47, 50-52, and 55-59)(e.g., within the hinge region, or between the C-terminus of CH1 and the N-terminus of the hinge region) of a heavy chain of the full-length antibody; and wherein the anti-CD25 antibody comprises VH-CDR1, VH-CDR2, and VH-CDR3 of a VH comprising the sequence of SEQ ID NO: 162, and VL-CDR1, VL-CDR2, and VL-CDR3 of a VL comprising the sequence of SEQ ID NO: 163. In some embodiments, the anti-CD25 antibody comprises a VH comprising the sequence of SEQ ID NO: 162 and a VL comprising the sequence of SEQ ID NO: 163. In some embodiments, the parental anti-CD25 antibody comprises two heavy chains each comprising the sequence of SEQ ID NO: 164, and two light chains each comprising the sequence of SEQ ID NO: 165. In some embodiments, the parental anti-CD25 antibody comprises two heavy chains each comprising the sequence of SEQ ID NO: 166, and two light chains each comprising the sequence of SEQ ID NO: 167. In some embodiments, one or both subunits of the IL-10 variant comprises the sequence of SEQ ID NO: 23. In some embodiments, the IL-10 variant comprises the sequence of SEQ ID NO: 28. In some embodiments, the heavy chain comprising the IL-10 variant positioned at the hinge region comprises the sequence of SEQ ID NO: 172. In some embodiments, there is provided an IL-10/anti-CD25 immunocytokine comprising: two light chains comprising the sequence of SEQ ID NO: 165, one heavy chain comprising an IL-10 variant positioned at the hinge region comprising the sequence of SEQ ID NO: 172, and one heavy chain comprises the sequence of SEQ ID NO: 168. In some embodiments, in the presence of binding of the antibody (or antigen-binding fragment) to CD25, the activity (binding affinity to corresponding cytokine receptor or subunit thereof, and/or biological activity) of the IL-10 cytokine or variant thereof increases at least about 20% (such as at least about any of 30%, 40%, 50%, 60%, 70%, 80%, 90%, 100%, 200%, 300%, 400%, 500%, or more) compared to that in the absence of binding of the antibody (or antigen-binding fragment) to CD25. In some embodiments, in the absence of binding of the antibody (or antigen-binding fragment) to CD25, the activity (binding affinity to corresponding cytokine receptor or subunit thereof, and/or biological activity) of the IL-10 cytokine or variant thereof positioned at the hinge region of the heavy chain is no more than about 70% (such as no more than about any of 60%, 50%, 40%, 30%, 20%, 10%, 9%, 8%, 7%, 6%, 5%, 4%, 3%, 2%, 1%, 0.9%, 0.8%, 0.7%, 0.6%, 0.5%, 0.4%, 0.3%, 0.2%, 0.1%, or 0%) of that of a corresponding IL-10 cytokine or variant thereof in a free state. In some embodiments, the antibody is monospecific. In some embodiments, the antibody is multispecific (e.g., bispecific). In some embodiments, the antibody is homodimeric. In some embodiments, the antibody is heterodimeric. In some embodiments, the antibody is an agonist antibody. In some embodiments, the antibody is an antagonist antibody.

[0178] In some embodiments, the antigen-binding protein is a PD-L2 (e.g., PD-L2 extracellular domain)-hinge-Fc fusion protein. Thus in some embodiments, there is provided an IL-10 immunocytokine (“IL-10/PD-L2-Fc immunocytokine”) comprising: a) a PD-L2-hinge-Fc fusion polypeptide comprising from N′ to C′: a PD-L2 (e.g., SEQ ID NO: 176) specifically recognizing PD-1, a hinge region (e.g., any of SEQ ID NOs: 40-47, 50-52, and 55-59), and an Fc domain subunit or portion thereof; and b) an IL-10 or variant thereof (e.g., SEQ ID NO: 27 or 28), wherein both subunits (e.g., any of SEQ ID NOs: 20-26) of the IL-10 or variant thereof are positioned in tandem (e.g., connected via an optional peptide linker such as any of SEQ ID NOs: 227-229) at the hinge region (e.g., within the hinge region, or between the C-terminus of PD-L2 and the N-terminus of the hinge region) of the PD-L2-hinge-Fc fusion polypeptide. In some embodiments, the parental PD-L2-hinge-Fc fusion protein comprises two PD-L2-hinge-Fc fusion polypeptides each comprising the sequence of SEQ ID NO: 177. In some embodiments, one or both subunits of the IL-10 variant comprises the sequence of SEQ ID NO: 23. In some embodiments, the IL-10 variant comprises the sequence of SEQ ID NO: 28. In some embodiments, the PD-L2-hinge-Fc fusion polypeptide comprising the IL-10 variant positioned at the hinge region comprises the sequence of SEQ ID NO: 184. In some embodiments, there is provided an IL-10/PD-L2-Fc immunocytokine comprising: a PD-L2-hinge-Fc fusion polypeptide comprising an IL-10 variant positioned at the hinge region comprises the sequence of SEQ ID NO: 184, and a PD-L2-hinge-Fc fusion polypeptide comprises the sequence of SEQ ID NO: 181. In some embodiments, in the presence of binding of the PD-L2 ligand to PD-1, the activity (binding affinity to corresponding cytokine receptor or subunit thereof, and/or biological activity) of the IL-10 cytokine or variant thereof increases at least about 20% (such as at least about any of 30%, 40%, 50%, 60%, 70%, 80%, 90%, 100%, 200%, 300%, 400%, 500%, or more) compared to that in the absence of binding of the PD-L2 ligand to PD-1. In some embodiments, in the absence of binding of the PD-L2 ligand to PD-1, the activity (binding affinity to corresponding cytokine receptor or subunit thereof, and/or biological activity) of the IL-10 cytokine or variant thereof positioned at the hinge region is no more than about 70% (such as no more than about any of 60%, 50%, 40%, 30%, 20%, 10%, 9%, 8%, 7%, 6%, 5%, 4%, 3%, 2%, 1%, 0.9%, 0.8%, 0.7%, 0.6%, 0.5%, 0.4%, 0.3%, 0.2%, 0.1%, or 0%) of that of a corresponding IL-10 cytokine or variant thereof in a free state. In some embodiments, the PD-L2-hinge-Fc fusion protein is monospecific. In some embodiments, the PD-L2-hinge-Fc fusion protein is multispecific (e.g., bispecific). In some embodiments, the PD-L2-hinge-Fc fusion protein is homodimeric. In some embodiments, the PD-L2-hinge-Fc fusion protein is heterodimeric. In some embodiments, the PD-L2 moiety is an agonist that can stimulate or enhance PD-1 signaling. In some embodiments, the PD-L2 moiety is an antagonist that can reduce or block PD-1 signaling.

[0179] In some embodiments, the cytokine or variant thereof is IL-12 or variant thereof. In some embodiments, there is provided an IL-12 immunocytokine comprising: a) an antigen-binding protein (e.g., antibody such as full-length antibody, or antigen-binding fragment-hinge-Fc fusion protein such as ligand/receptor-hinge-Fc fusion protein) specifically recognizing a target antigen (e.g., CTLA-4, PD-L1, PD-L2, CD25, HER2, PD-1, CD3, CD4, CD123, or CD8); and b) an IL-12 or variant thereof (e.g., SEQ ID NO: 35 or 36), wherein the antigen-binding protein comprises an antigen-binding polypeptide (e.g., antibody heavy chain, or antigen-binding fragment-hinge-Fc fusion polypeptide such as ligand/receptor-hinge-Fc fusion polypeptide) comprising from N′ to C′: an antigen-binding fragment (e.g., ligand such as PD-L2 extracellular domain, receptor, VHH, scFv, or VH), a hinge region, and an Fc domain subunit or portion thereof (e.g., CH2+CH3, or CH2 only), and wherein both p35 subunit (e.g., SEQ ID NO: 29) and p40 subunit (e.g., any of SEQ ID NOs: 30-34) of the IL-12 or variant thereof are positioned in tandem (e.g., connected via an optional peptide linker such as any of SEQ ID NOs: 227-229) at (e.g., at the N′ of, at the C′ of, or within) the hinge region. In some embodiments, the antigen-binding protein is an antibody (e.g., full-length antibody) specifically recognizing the target antigen, the antigen-binding polypeptide comprising the hinge region is a heavy chain of the antibody, and both p35 subunit (e.g., SEQ ID NO: 29) and p40 subunit (e.g., any of SEQ ID NOs: 30-34) of the IL-12 or variant thereof are positioned in tandem (e.g., connected via an optional peptide linker such as any of SEQ ID NOs: 227-229) at the hinge region of the heavy chain. In some embodiments, the antigen-binding fragment is a ligand, and the target antigen is a receptor specifically recognized by the ligand. In some embodiments, the antigen-binding fragment is a receptor, and the target antigen is a ligand specifically recognized by the receptor. In some embodiments, there is provided an IL-12 immunocytokine comprising: a) an antibody (e.g., full-length antibody, heavy chain only antibody, or antigen-binding fragment fused to an Fc domain subunit or portion thereof via a hinge region) specifically recognizing a target antigen (e.g., CTLA-4, PD-L1, PD-L2, CD25, HER2, PD-1, CD3, CD4, CD123, or CD8); and b) an IL-12 or variant thereof (e.g., SEQ ID NO: 35 or 36), wherein the antibody comprises a heavy chain comprising a hinge region, and wherein both p35 subunit (e.g., SEQ ID NO: 29) and p40 subunit (e.g., any of SEQ ID NOs: 30-34) of the IL-12 or variant thereof are positioned in tandem (e.g., connected via an optional peptide linker such as any of SEQ ID NOs: 227-229) at the hinge region (e.g., within the hinge region, or between the C-terminus of CH1 and the N-terminus of the hinge region) of the heavy chain. In some embodiments, there is provided an IL-12 immunocytokine comprising: a) an antibody specifically recognizing a target antigen (e.g., CTLA-4, PD-L1, PD-L2, CD25, HER2, PD-1, CD3, CD4, CD123, or CD8); and b) an IL-12 or variant thereof (e.g., SEQ ID NO: 35 or 36), wherein the antibody comprises a heavy chain comprising from N-terminus to C-terminus: a VH domain, optionally a CH1 domain, [a first subunit of IL-12 or variant thereof (e.g., p40, such as any of SEQ ID NOs: 30-34), optionally a linker (e.g., peptide linker), a second subunit of IL-12 or variant thereof (e.g., p35, such as SEQ ID NO: 29)] at a hinge region, a CH2 domain, and optionally a CH3 domain. In some embodiments, there is provided an IL-12 immunocytokine comprising: a) a full-length antibody specifically recognizing a target antigen (e.g., CTLA-4, PD-L1, PD-L2, CD25, HER2, PD-1, CD3, CD4, CD123, or CD8); and b) an IL-12 or variant thereof (e.g., SEQ ID NO: 35 or 36), wherein both p35 subunit (e.g., SEQ ID NO: 29) and p40 subunit (e.g., any of SEQ ID NOs: 30-34) of the IL-12 or variant thereof are positioned in tandem (e.g., connected via an optional peptide linker such as any of SEQ ID NOs: 227-229) at the hinge region (e.g., within the hinge region, or between the C-terminus of CH1 and the N-terminus of the hinge region) of a heavy chain of the full-length antibody. In some embodiments, there is provided an IL-12 immunocytokine comprising: a) a full-length antibody specifically recognizing a target antigen (e.g., CTLA-4, PD-L1, PD-L2, CD25, HER2, PD-1, CD3, CD4, CD123, or CD8); and b) an IL-12 variant comprising one or more mutations within the p40 subunit at a position selected from the group consisting of E45, Q56, V57, K58, E59, F60, G61, D62, A63, G64, Q65, and C177 relative to a wildtype p40 subunit comprising the sequence of SEQ ID NO: 30, wherein both p35 subunit (e.g., SEQ ID NO: 29) and p40 subunit of the IL-12 variant are positioned in tandem (e.g., connected via an optional peptide linker such as any of SEQ ID NOs: 227-229) at the hinge region (e.g., within the hinge region, or between the C-terminus of CH1 and the N-terminus of the hinge region) of a heavy chain of the full-length antibody. In some embodiments, there is provided an IL-12 immunocytokine comprising: a) a full-length antibody specifically recognizing a target antigen (e.g., CTLA-4, PD-L1, PD-L2, CD25, HER2, PD-1, CD3, CD4, CD123, or CD8); and b) an IL-12 variant comprising one or more mutations within the p40 subunit selected from the group consisting of Q56A, V57A, K58A, E59A, F60A, G61A, D62A, A63S, G64A, and Q65A relative to a wildtype p40 subunit comprising the sequence of SEQ ID NO: 30, wherein both p35 subunit (e.g., SEQ ID NO: 29) and p40 subunit of the IL-12 variant are positioned in tandem (e.g., connected via an optional peptide linker such as any of SEQ ID NOs: 227-229) at the hinge region (e.g., within the hinge region, or between the C-terminus of CH1 and the N-terminus of the hinge region) of a heavy chain of the full-length antibody. In some embodiments, there is provided an IL-12 immunocytokine comprising: a) a full-length antibody specifically recognizing a target antigen (e.g., CTLA-4, PD-L1, PD-L2, CD25, HER2, PD-1, CD3, CD4, CD123, or CD8); and b) an IL-12 variant, wherein the p40 subunit of the IL-12 variant comprises the sequence of any of SEQ ID NOs: 31-34, wherein both p35 subunit (e.g., SEQ ID NO: 29) and p40 subunit of the IL-12 variant are positioned in tandem (e.g., connected via an optional peptide linker such as any of SEQ ID NOs: 227-229) at the hinge region (e.g., within the hinge region, or between the C-terminus of CH1 and the N-terminus of the hinge region) of a heavy chain of the full-length antibody. In some embodiments, there is provided an IL-12 immunocytokine comprising: a) a full-length antibody specifically recognizing a target antigen (e.g., CTLA-4, PD-L1, PD-L2, CD25, HER2, PD-1, CD3, CD4, CD123, or CD8); and b) an IL-12 variant comprising an E59A/F60A mutation within the p40 subunit relative to a wildtype p40 subunit comprising the sequence of SEQ ID NO: 30, wherein both p35 subunit (e.g., SEQ ID NO: 29) and p40 subunit of the IL-12 variant are positioned in tandem (e.g., connected via an optional peptide linker such as any of SEQ ID NOs: 227-229) at the hinge region (e.g., within the hinge region, or between the C-terminus of CH1 and the N-terminus of the hinge region) of a heavy chain of the full-length antibody. In some embodiments, there is provided an IL-12 immunocytokine comprising: a) a full-length antibody specifically recognizing a target antigen (e.g., CTLA-4, PD-L1, PD-L2, CD25, HER2, PD-1, CD3, CD4, CD123, or CD8); and b) an IL-12 variant, wherein the p40 subunit of the IL-12 variant comprises the sequence of SEQ ID NO: 31, and wherein both p35 subunit (e.g., SEQ ID NO: 29) and p40 subunit of the IL-12 variant are positioned in tandem (e.g., connected via an optional peptide linker such as any of SEQ ID NOs: 227-229) at the hinge region (e.g., within the hinge region, or between the C-terminus of CH1 and the N-terminus of the hinge region) of a heavy chain of the full-length antibody. In some embodiments, the p40 subunit or variant thereof is at N-terminus of the p35 subunit or variant thereof (e.g., p40-optional linker (e.g., any of SEQ ID NOs: 227-229)-p35). In some embodiments, the p35 subunit or variant thereof is at N-terminus of the p40 subunit or variant thereof (e.g., p35-optional linker (e.g., any of SEQ ID NOs: 227-229)-p40). In some embodiments, the p40 subunit and the p35 subunit of the IL-12 or variant thereof are connected by a linker. In some embodiments, there is provided an IL-12 immunocytokine comprising: a) a full-length antibody specifically recognizing a target antigen (e.g., CTLA-4, PD-L1, PD-L2, CD25, HER2, PD-1, CD3, CD4, CD123, or CD8); and b) an IL-12 variant comprising the sequence of SEQ ID NO: 36, wherein the IL-12 variant is positioned at the hinge region (e.g., within the hinge region, or between the C-terminus of CH1 and the N-terminus of the hinge region) of a heavy chain of the full-length antibody. In some embodiments, the activity (binding affinity to corresponding cytokine receptor or subunit thereof, and/or biological activity) of the IL-12 variant in a free state is no more than about 80% (such as no more than about any of 70%, 60%, 50%, 40%, 30%, 20%, 10%, or 5%) of that of a corresponding wildtype IL-12 in a free state. In some embodiments, the antigen-binding protein (e.g., antibody or fragment thereof, or antigen-binding fragment-hinge-Fc fusion protein such as ligand/receptor-hinge-Fc fusion protein) is monospecific. In some embodiments, the antigen-binding protein is multispecific (e.g., bispecific). In some embodiments, the parental antigen-binding protein (e.g., antibody such as full-length antibody, or antigen-binding fragment-hinge-Fc fusion protein such as ligand/receptor-hinge-Fc fusion protein) is homodimeric. In some embodiments, the parental antigen-binding protein is heterodimeric. In some embodiments, the antigen-binding protein is an agonist. In some embodiments, the antigen-binding protein is an antagonist. In some embodiments, the hinge region comprises the sequence of any of SEQ ID NOs: 40-47, 50-52, and 55-59.

[0180] In some embodiments, the antigen-binding protein is an anti-HER2 antibody. Thus in some embodiments, there is provided an IL-12 immunocytokine (“IL-12/anti-HER2 immunocytokine”) comprising: a) an antibody (e.g., full-length antibody, heavy chain only antibody, or antigen-binding fragment fused to an Fc domain subunit or portion thereof) specifically recognizing HER2; and b) an IL-12 or variant thereof (e.g., SEQ ID NO: 35 or 36), wherein the antibody comprises a heavy chain comprising a hinge region (e.g., any of SEQ ID NOs: 40-47, 50-52, and 55-59), and wherein both p35 subunit (e.g., SEQ ID NO: 29) and p40 subunit (e.g., any of SEQ ID NOs: 30-34) of the IL-12 or variant thereof are positioned in tandem (e.g., connected via an optional peptide linker such as any of SEQ ID NOs: 227-229) at the hinge region (e.g., within the hinge region, or between the C-terminus of CH1 and the N-terminus of the hinge region) of the heavy chain. In some embodiments, there is provided an IL-12/anti-HER2 immunocytokine comprising: a) a full-length antibody specifically recognizing HER2; and b) an IL-12 or variant thereof (e.g., SEQ ID NO: 35 or 36), wherein both p35 subunit (e.g., SEQ ID NO: 29) and p40 subunit (e.g., any of SEQ ID NOs: 30-34) of the IL-12 or variant thereof are positioned in tandem (e.g., connected via an optional peptide linker such as any of SEQ ID NOs: 227-229) at the hinge region (e.g., any of SEQ ID NOs: 40-47, 50-52, and 55-59)(e.g., within the hinge region, or between the C-terminus of CH1 and the N-terminus of the hinge region) of a heavy chain of the full-length antibody; and wherein the anti-HER2 antibody comprises: i) a VH-CDR1 comprising the sequence of SEQ ID NO: 188; ii) a VH-CDR2 comprising the sequence of SEQ ID NO: 189; iii) a VH-CDR3 comprising the sequence of SEQ ID NO: 190; iv) a VL-CDR1 comprising the sequence of SEQ ID NO: 191; v) a VL-CDR2 comprising the sequence of SEQ ID NO: 192; and vi) a VL-CDR3 comprising the sequence of SEQ ID NO: 193. In some embodiments, the anti-HER2 antibody or antigen binding fragment thereof comprises a VH comprising the sequence of SEQ ID NO: 150 and a VL comprising the sequence of SEQ ID NO: 151. In some embodiments, the parental anti-HER2 antibody comprises two heavy chains each comprising the sequence of SEQ ID NO: 152 or 153, and two light chains each comprising the sequence of SEQ ID NO: 154.

[0181] In some embodiments, the p40 subunit or variant thereof (e.g., any of SEQ ID NOs: 30-34) is at N-terminus of the p35 subunit or variant thereof (e.g., SEQ ID NO: 29) (e.g., p40-optional linker (e.g., any of SEQ ID NOs: 227-229)-p35). In some embodiments, the p35 subunit or variant thereof is at N-terminus of the p40 subunit or variant thereof (e.g., p35-optional linker (e.g., any of SEQ ID NOs: 227-229)-p40). In some embodiments, the p40 subunit of the IL-12 variant comprises the sequence of SEQ ID NO: 31. In some embodiments, the p40 subunit and the p35 subunit of the IL-12 or variant thereof are connected by a linker. In some embodiments, the IL-12 variant comprises the sequence of SEQ ID NO: 36. In some embodiments, the heavy chain comprising the IL-12 variant positioned at the hinge region comprises the sequence of SEQ ID NO: 160. In some embodiments, there is provided an IL-12/anti-HER2 immunocytokine comprising: two light chains comprising the sequence of SEQ ID NO: 154, one heavy chain comprising an IL-12 variant positioned at the hinge region comprising the sequence of SEQ ID NO: 160, and one heavy chain comprises the sequence of SEQ ID NO: 155. In some embodiments, in the presence of binding of the antibody (or antigen-binding fragment) to HER2, the activity (binding affinity to corresponding cytokine receptor or subunit thereof, and/or biological activity) of the IL-12 cytokine or variant thereof increases at least about 20% (such as at least about any of 30%, 40%, 50%, 60%, 70%, 80%, 90%, 100%, 200%, 300%, 400%, 500%, or more) compared to that in the absence of binding of the antibody (or antigen-binding fragment) to HER2. In some embodiments, in the absence of binding of the antibody (or antigen-binding fragment) to HER2, the activity (binding affinity to corresponding cytokine receptor or subunit thereof, and/or biological activity) of the IL-12 cytokine or variant thereof positioned at the hinge region of the heavy chain is no more than about 70% (such as no more than about any of 60%, 50%, 40%, 30%, 20%, 10%, 9%, 8%, 7%, 6%, 5%, 4%, 3%, 2%, 1%, 0.9%, 0.8%, 0.7%, 0.6%, 0.5%, 0.4%, 0.3%, 0.2%, 0.1%, or 0%) of that of a corresponding IL-12 cytokine or variant thereof in a free state. In some embodiments, the antibody is monospecific. In some embodiments, the antibody is multispecific (e.g., bispecific). In some embodiments, the antibody is homodimeric. In some embodiments, the antibody is heterodimeric. In some embodiments, the antibody is an agonist antibody. In some embodiments, the antibody is an antagonist antibody.

[0182] In some embodiments, the antigen-binding protein is an anti-CD3 antibody. Thus in some embodiments, there is provided an IL-12 immunocytokine (“IL-12/anti-CD3 immunocytokine”) comprising: a) an antibody (e.g., full-length antibody, heavy chain only antibody, or antigen-binding fragment fused to an Fc domain subunit or portion thereof) specifically recognizing CD3; and b) an IL-12 or variant thereof (e.g., SEQ ID NO: 35 or 36), wherein the antibody comprises a heavy chain comprising a hinge region (e.g., any of SEQ ID NOs: 40-47, 50-52, and 55-59), and wherein both p35 subunit (e.g., SEQ ID NO: 29) and p40 subunit (e.g., any of SEQ ID NOs: 30-34) of the IL-12 or variant thereof are positioned in tandem (e.g., connected via an optional peptide linker such as any of SEQ ID NOs: 227-229) at the hinge region (e.g., within the hinge region, or between the C-terminus of CH1 and the N-terminus of the hinge region) of the heavy chain. In some embodiments, there is provided an IL-12/anti-CD3 immunocytokine comprising: a) a full-length antibody specifically recognizing CD3; and b) an IL-12 or variant thereof (e.g., SEQ ID NO: 35 or 36), wherein both p35 subunit (e.g., SEQ ID NO: 29) and p40 subunit (e.g., any of SEQ ID NOs: 30-34) of the IL-12 or variant thereof are positioned in tandem (e.g., connected via an optional peptide linker such as any of SEQ ID NOs: 227-229) at the hinge region (e.g., any of SEQ ID NOs: 40-47, 50-52, and 55-59)(e.g., within the hinge region, or between the C-terminus of CH1 and the N-terminus of the hinge region) of a heavy chain of the full-length antibody; and wherein the anti-CD3 antibody comprises: i) a VH-CDR1 comprising the sequence of SEQ ID NO: 85; ii) a VH-CDR2 comprising the sequence of SEQ ID NO: 86; iii) a VH-CDR3 comprising the sequence of SEQ ID NO: 87; iv) a VL-CDR1 comprising the sequence of SEQ ID NO: 88; v) a VL-CDR2 comprising the sequence of SEQ ID NO: 89; and vi) a VL-CDR3 comprising the sequence of SEQ ID NO: 90. In some embodiments, the anti-CD3 antibody comprises a VH comprising the sequence of SEQ ID NO: 91 and a VL comprising the sequence of SEQ ID NO: 92. In some embodiments, the parental anti-CD3 antibody comprises two heavy chains each comprising the sequence of SEQ ID NO: 93, and two light chains each comprising the sequence of SEQ ID NO: 94. In some embodiments, the p40 subunit or variant thereof (e.g., any of SEQ ID NOs: 30-34) is at N-terminus of the p35 subunit or variant thereof (e.g., SEQ ID NO: 29) (e.g., p40-optional linker (e.g., any of SEQ ID NOs: 227-229)-p35). In some embodiments, the p35 subunit or variant thereof is at N-terminus of the p40 subunit or variant thereof (e.g., p35-optional linker (e.g., any of SEQ ID NOs: 227-229)-p40). In some embodiments, the p40 subunit of the IL-12 variant comprises the sequence of SEQ ID NO: 31. In some embodiments, the p40 subunit and the p35 subunit of the IL-12 or variant thereof are connected by a linker. In some embodiments, the IL-12 variant comprises the sequence of SEQ ID NO: 36. In some embodiments, the heavy chain comprising the IL-12 variant positioned at the hinge region comprises the sequence of SEQ ID NO: 100. In some embodiments, there is provided an IL-12/anti-CD3 immunocytokine comprising: two light chains comprising the sequence of SEQ ID NO: 94, one heavy chain comprising an IL-12 variant positioned at the hinge region comprising the sequence of SEQ ID NO: 100, and one heavy chain comprises the sequence of SEQ ID NO: 95. In some embodiments, in the presence of binding of the antibody (or antigen-binding fragment) to CD3, the activity (binding affinity to corresponding cytokine receptor or subunit thereof, and/or biological activity) of the IL-12 cytokine or variant thereof increases at least about 20% (such as at least about any of 30%, 40%, 50%, 60%, 70%, 80%, 90%, 100%, 200%, 300%, 400%, 500%, or more) compared to that in the absence of binding of the antibody (or antigen-binding fragment) to CD3. In some embodiments, in the absence of binding of the antibody (or antigen-binding fragment) to CD3, the activity (binding affinity to corresponding cytokine receptor or subunit thereof, and/or biological activity) of the IL-12 cytokine or variant thereof positioned at the hinge region of the heavy chain is no more than about 70% (such as no more than about any of 60%, 50%, 40%, 30%, 20%, 10%, 9%, 8%, 7%, 6%, 5%, 4%, 3%, 2%, 1%, 0.9%, 0.8%, 0.7%, 0.6%, 0.5%, 0.4%, 0.3%, 0.2%, 0.1%, or 0%) of that of a corresponding IL-12 cytokine or variant thereof in a free state. In some embodiments, the antibody is monospecific. In some embodiments, the antibody is multispecific (e.g., bispecific). In some embodiments, the antibody is homodimeric. In some embodiments, the antibody is heterodimeric. In some embodiments, the antibody is an agonist antibody. In some embodiments, the antibody is an antagonist antibody.

[0183] In some embodiments, the antibody is an anti-PD-1 antibody. Thus in some embodiments, there is provided an IL-12 immunocytokine (“IL-12/anti-PD-1 immunocytokine”) comprising: a) an antibody (e.g., full-length antibody, heavy chain only antibody, or antigen-binding fragment fused to an Fc domain subunit or portion thereof) specifically recognizing PD-1; and b) an IL-12 or variant thereof (e.g., SEQ ID NO: 35 or 36), wherein the antibody comprises a heavy chain comprising a hinge region (e.g., any of SEQ ID NOs: 40-47, 50-52, and 55-59), and wherein both p35 subunit (e.g., SEQ ID NO: 29) and p40 subunit (e.g., any of SEQ ID NOs: 30-34) of the IL-12 or variant thereof are positioned in tandem (e.g., connected via an optional peptide linker such as any of SEQ ID NOs: 227-229) at the hinge region (e.g., within the hinge region, or between the C-terminus of CH1 and the N-terminus of the hinge region) of the heavy chain. In some embodiments, there is provided an IL-12/anti-PD-1 immunocytokine comprising: a) a full-length antibody specifically recognizing PD-1; and b) an IL-12 or variant thereof (e.g., SEQ ID NO: 35 or 36), wherein both p35 subunit (e.g., SEQ ID NO: 29) and p40 subunit (e.g., any of SEQ ID NOs: 30-34) of the IL-12 or variant thereof are positioned in tandem (e.g., connected via an optional peptide linker such as any of SEQ ID NOs: 227-229) at the hinge region (e.g., any of SEQ ID NOs: 40-47, 50-52, and 55-59)(e.g., within the hinge region, or between the C-terminus of CH1 and the N-terminus of the hinge region) of a heavy chain of the full-length antibody; and wherein the anti-PD-1 antibody comprises VH-CDR1, VH-CDR2, and VH-CDR3 of a VH comprising the sequence of SEQ ID NO: 102, and VL-CDR1, VL-CDR2, and VL-CDR3 of a VL comprising the sequence of SEQ ID NO: 103. In some embodiments, the anti-PD-1 antibody comprises a VH comprising the sequence of SEQ ID NO: 102 and a VL comprising the sequence of SEQ ID NO: 103. In some embodiments, the parental anti-PD-1 antibody comprises two heavy chains each comprising the sequence of SEQ ID NO: 104 or 105, and two light chains each comprising the sequence of SEQ ID NO: 106. In some embodiments, the p40 subunit or variant thereof (e.g., any of SEQ ID NOs: 30-34) is at N-terminus of the p35 subunit or variant thereof (e.g., SEQ ID NO: 29) (e.g., p40-optional linker (e.g., any of SEQ ID NOs: 227-229)-p35). In some embodiments, the p35 subunit or variant thereof is at N-terminus of the p40 subunit or variant thereof (e.g., p35-optional linker (e.g., any of SEQ ID NOs: 227-229)-p40). In some embodiments, the p40 subunit of the IL-12 variant comprises the sequence of SEQ ID NO: 31. In some embodiments, the p40 subunit and the p35 subunit of the IL-12 or variant thereof are connected by a linker. In some embodiments, the IL-12 variant comprises the sequence of SEQ ID NO: 36. In some embodiments, the heavy chain comprising the IL-12 variant positioned at the hinge region comprises the sequence of SEQ ID NO: 112. In some embodiments, there is provided an IL-12/anti-PD-1 immunocytokine comprising: two light chains comprising the sequence of SEQ ID NO: 106, one heavy chain comprising an IL-12 variant positioned at the hinge region comprising the sequence of SEQ ID NO: 112, and one heavy chain comprises the sequence of SEQ ID NO: 107. In some embodiments, in the presence of binding of the antibody (or antigen-binding fragment) to PD-1, the activity (binding affinity to corresponding cytokine receptor or subunit thereof, and/or biological activity) of the IL-12 or variant thereof increases at least about 20% (such as at least about any of 30%, 40%, 0%, 60%, 70%, 80%, 90%, 100%, 200%, 300%, 400%, 500%, or more) compared to that in the absence of binding of the antibody (or antigen-binding fragment) to PD-1. In some embodiments, in the absence of binding of the antibody (or antigen-binding fragment) to PD-1, the activity (binding affinity to corresponding cytokine receptor or subunit thereof, and/or biological activity) of the IL-12 or variant thereof positioned at the hinge region of the heavy chain is no more than about 70% (such as no more than about any of 60%, 50%, 40%, 30%, 20%, 10%, 9%, 8%, 7%, 6%, 5%, 4%, 3%, 2%, 1%, 0.9%, 0.8%, 0.7%, 0.6%, 0.5%, 0.4%, 0.3%, 0.2%, 0.1%, or 0%) of that of a corresponding IL-12 or variant thereof in a free state. In some embodiments, the antibody is monospecific. In some embodiments, the antibody is multispecific (e.g., bispecific). In some embodiments, the antibody is homodimeric. In some embodiments, the antibody is heterodimeric. In some embodiments, the antibody is an agonist antibody. In some embodiments, the antibody is an antagonist antibody.

[0184] In some embodiments, there is provided an IL-12/IL-2 immunocytokine (“IL-12/IL-2/anti-PD-1 immunocytokine”) comprising: a) an antigen-binding protein (e.g., full-length antibody, heavy chain only antibody, or antigen-binding fragment fused to an Fc domain subunit or portion thereof) specifically recognizing PD-1; b) an IL-12 or variant thereof (e.g., SEQ ID NO: 35 or 36); and c) an IL-2 or variant thereof (e.g., SEQ ID NO: 1 or 2), wherein the antigen-binding protein comprises two antigen-binding polypeptides (e.g., antibody heavy chain, or antigen-binding fragment-Fc fusion polypeptide) each comprising from N′ to C′: an antigen-binding fragment (e.g., VHH, scFv, or VH), a hinge region (e.g., any of SEQ ID NOs: 40-47, 50-52, and 55-59), and an Fc domain subunit or portion thereof (e.g., CH2+CH3, or CH2 only), wherein both p35 subunit (e.g., SEQ ID NO: 29) and p40 subunit (e.g., any of SEQ ID NOs: 30-34) of the IL-12 or variant thereof are positioned in tandem (e.g., connected via an optional peptide linker such as any of SEQ ID NOs: 227-229) at the hinge region (e.g., within the hinge region, or between the C-terminus of CH1 and the N-terminus of the hinge region) of the first antigen-binding polypeptide (e.g., antibody heavy chain), and wherein the IL-2 or variant thereof is positioned at the hinge region (e.g., within the hinge region, or between the C-terminus of CH1 and the N-terminus of the hinge region) of the second antigen-binding polypeptide (e.g., antibody heavy chain). In some embodiments, there is provided an IL-12/IL-2/anti-PD-1 immunocytokine comprising: a) a full-length antibody specifically recognizing PD-1 comprising two heavy chains; b) an IL-12 or variant thereof (e.g., SEQ ID NO: 35 or 36); and c) an IL-2 or variant thereof (e.g., SEQ ID NO: 1 or 2); wherein both p35 subunit (e.g., SEQ ID NO: 29) and p40 subunit (e.g., any of SEQ ID NOs: 30-34) of the IL-12 or variant thereof are positioned in tandem (e.g., connected via an optional peptide linker such as any of SEQ ID NOs: 227-229) at the hinge region (e.g., any of SEQ ID NOs: 40-47, 50-52, and 55-59)(e.g., within the hinge region, or between the C-terminus of CH1 and the N-terminus of the hinge region) of the first heavy chain of the full-length antibody; wherein the IL-2 or variant thereof (e.g., SEQ ID NO: 1 or 2) is positioned at the hinge region (e.g., any of SEQ ID NOs: 40-47, 50-52, and 55-59)(e.g., within the hinge region, or between the C-terminus of CH1 and the N-terminus of the hinge region) of the second heavy chain of the full-length antibody; and wherein the anti-PD-1 antibody comprises VH-CDR1, VH-CDR2, and VH-CDR3 of a V_{H} comprising the sequence of SEQ ID NO: 102, and VL-CDR1, VL-CDR2, and VL-CDR3 of a V_{L} comprising the sequence of SEQ ID NO: 103. In some embodiments, the anti-PD-1 antibody comprises a VH comprising the sequence of SEQ ID NO: 102 and a VL comprising the sequence of SEQ ID NO: 103. In some embodiments, the parental anti-PD-1 antibody comprises two heavy chains each comprising the sequence of SEQ ID NO: 104 or 105, and two light chains each comprising the sequence of SEQ ID NO: 106. In some embodiments, the p40 subunit or variant thereof (e.g., any of SEQ ID NOs: 30-34) is at N-terminus of the p35 subunit or variant thereof (e.g., SEQ ID NO: 29) (e.g., p40-optional linker (e.g., any of SEQ ID NOs: 227-229)-p35). In some embodiments, the p35 subunit or variant thereof is at N-terminus of the p40 subunit or variant thereof (e.g., p35-optional linker (e.g., any of SEQ ID NOs: 227-229)-p40). In some embodiments, the p40 subunit of the IL-12 variant comprises the sequence of SEQ ID NO: 31. In some embodiments, the p40 subunit and the p35 subunit of the IL-12 or variant thereof are connected by a linker. In some embodiments, the IL-12 variant comprises the sequence of SEQ ID NO: 36.

[0185] In some embodiments, the IL-2 variant comprises the sequence of SEQ ID NO: 2. In some embodiments, the heavy chain comprising the IL-12 variant positioned at the hinge region comprises the sequence of SEQ ID NO: 112. In some embodiments, the heavy chain comprising the IL-2 variant positioned at the hinge region comprises the sequence of SEQ ID NO: 108. In some embodiments, in the presence of binding of the antigen-binding protein (e.g., antibody) or antigen-binding fragment to PD-1 (e.g., binding of the first antigen-binding fragment to PD-1, and/or binding of the second antigen-binding fragment to PD-1), the activity (binding affinity to corresponding cytokine receptor or subunit thereof, and/or biological activity) of the IL-12 and/or IL-2 (or variant thereof) increases at least about 20% (such as at least about any of 30%, 40%, 50%, 60%, 70%, 80%, 90%, 100%, 200%, 300%, 400%, 500%, or more) compared to that in the absence of binding of the antibody (or antigen-binding fragment) to PD-1 (e.g., neither antigen-binding fragment binds to PD-1). In some embodiments, in the absence of binding of the antigen-binding protein (e.g., antibody) or antigen-binding fragment to PD-1 (e.g., neither antigen-binding fragment binds to PD-1), the activity (binding affinity to corresponding cytokine receptor or subunit thereof, and/or biological activity) of the IL-12 and/or IL-2 (or variant thereof) positioned at the hinge region of each antigen-binding polypeptide (e.g., antibody heavy chain, or antigen-binding fragment-Fc polypeptide) is no more than about 70% (such as no more than about any of 60%, 50%, 40%, 30%, 20%, 10%, 9%, 8%, 7%, 6%, 5%, 4%, 3%, 2%, 1%, 0.9%, 0.8%, 0.7%, 0.6%, 0.5%, 0.4%, 0.3%, 0.2%, 0.1%, or 0%) of that of a corresponding IL-12 and/or IL-2 (or variant thereof) in a free state. The parental antigen-binding protein (e.g., antibody) can be monospecific or multispecific (e.g., bispecific). The parental antigen-binding protein (e.g., antibody) can be homodimeric or heterodimeric. The parental antigen-binding protein (e.g., antibody) can be an agonist or an antagonist.

[0186] In some embodiments, the antibody is an anti-CD4 antibody. Thus in some embodiments, there is provided an IL-12 immunocytokine (“IL-12/anti-CD4 immunocytokine”) comprising: a) an antibody (e.g., full-length antibody, heavy chain only antibody, or antigen-binding fragment fused to an Fc domain subunit or portion thereof) specifically recognizing CD4; and b) an IL-12 or variant thereof (e.g., SEQ ID NO: 35 or 36), wherein the antibody comprises a heavy chain comprising a hinge region (e.g., any of SEQ ID NOs: 40-47, 50-52, and 55-59), and wherein both p35 subunit (e.g., SEQ ID NO: 29) and p40 subunit (e.g., any of SEQ ID NOs: 30-34) of the IL-12 or variant thereof are positioned in tandem (e.g., connected via an optional peptide linker such as any of SEQ ID NOs: 227-229) at the hinge region (e.g., within the hinge region, or between the C-terminus of CH1 and the N-terminus of the hinge region) of the heavy chain. In some embodiments, there is provided an IL-12/anti-CD4 immunocytokine comprising: a) a full-length antibody specifically recognizing CD4; and b) an IL-12 or variant thereof (e.g., SEQ ID NO: 35 or 36), wherein both p35 subunit (e.g., SEQ ID NO: 29) and p40 subunit (e.g., any of SEQ ID NOs: 30-34) of the IL-12 or variant thereof are positioned in tandem (e.g., connected via an optional peptide linker such as any of SEQ ID NOs: 227-229) at the hinge region (e.g., any of SEQ ID NOs: 40-47, 50-52, and 55-59)(e.g., within the hinge region, or between the C-terminus of CH1 and the N-terminus of the hinge region) of a heavy chain of the full-length antibody; and wherein the anti-CD4 antibody comprises: i) a VH-CDR1 comprising the sequence of SEQ ID NO: 67; ii) a VH-CDR2 comprising the sequence of SEQ ID NO: 68; iii) a VH-CDR3 comprising the sequence of SEQ ID NO: 69; iv) a VL-CDR1 comprising the sequence of SEQ ID NO: 70; v) a VL-CDR2 comprising the sequence of SEQ ID NO: 71; and vi) a VL-CDR3 comprising the sequence of SEQ ID NO: 72. In some embodiments, the anti-CD4 antibody comprises a VH comprising the sequence of SEQ ID NO: 73 and a VL comprising the sequence of SEQ ID NO: 74. In some embodiments, the parental anti-CD4 antibody comprises two heavy chains each comprising the sequence of SEQ ID NO: 75 or 76, and two light chains each comprising the sequence of SEQ ID NO: 77. In some embodiments, the p40 subunit of the IL-12 variant comprises the sequence of SEQ ID NO: 31. In some embodiments, the p40 subunit or variant thereof (e.g., any of SEQ ID NOs: 30-34) is at N-terminus of the p35 subunit or variant thereof (e.g., SEQ ID NO: 29) (e.g., p40-optional linker (e.g., any of SEQ ID NOs: 227-229)-p35). In some embodiments, the p35 subunit or variant thereof is at N-terminus of the p40 subunit or variant thereof (e.g., p35-optional linker (e.g., any of SEQ ID NOs: 227-229)-p40). In some embodiments, the p40 subunit and the p35 subunit of the IL-12 or variant thereof are connected by a linker. In some embodiments, the IL-12 variant comprises the sequence of SEQ ID NO: 36. In some embodiments, the heavy chain comprising the IL-12 variant positioned at the hinge region comprises the sequence of SEQ ID NO: 83. In some embodiments, there is provided an IL-12/anti-CD4 immunocytokine comprising: two light chains comprising the sequence of SEQ ID NO: 77, one heavy chain comprising an IL-12 variant positioned at the hinge region comprising the sequence of SEQ ID NO: 83, and one heavy chain comprises the sequence of SEQ ID NO: 78. In some embodiments, in the presence of binding of the antibody (or antigen-binding fragment) to CD4, the activity (binding affinity to corresponding cytokine receptor or subunit thereof, and/or biological activity) of the IL-12 or variant thereof increases at least about 20% (such as at least about any of 30%, 40%, 50%, 60%, 70%, 80%, 90%, 100%, 200%, 300%, 400%, 500%, or more) compared to that in the absence of binding of the antibody (or antigen-binding fragment) to CD4. In some embodiments, in the absence of binding of the antibody (or antigen-binding fragment) to CD4, the activity (binding affinity to corresponding cytokine receptor or subunit thereof, and/or biological activity) of the IL-12 or variant thereof positioned at the hinge region of the heavy chain is no more than about 70% (such as no more than about any of 60%, 50%, 40%, 30%, 20%, 10%, 9%, 8%, 7%, 6%, 5%, 4%, 3%, 2%, %, 0.9%, 0.8%, 0.7%, 0.6%, 0.5%, 0.4%, 0.3%, 0.2%, 0.1%, or 0%) of that of a corresponding IL-12 or variant thereof in a free state. In some embodiments, the antibody is monospecific. In some embodiments, the antibody is multispecific (e.g., bispecific). In some embodiments, the antibody is homodimeric. In some embodiments, the antibody is heterodimeric. In some embodiments, the antibody is an agonist antibody. In some embodiments, the antibody is an antagonist antibody.

[0187] In some embodiments, the antibody is an anti-CD8 antibody. Thus in some embodiments, there is provided an IL-12 immunocytokine (“IL-12/anti-CD8 immunocytokine”) comprising: a) an antibody (e.g., full-length antibody, heavy chain only antibody, or antigen-binding fragment fused to an Fc domain subunit or portion thereof) specifically recognizing CD8; and b) an IL-12 or variant thereof (e.g., SEQ ID NO: 35 or 36), wherein the antibody comprises a heavy chain comprising a hinge region (e.g., any of SEQ ID NOs: 40-47, 50-52, and 55-59), wherein both p35 subunit (e.g., SEQ ID NO: 29) and p40 subunit (e.g., any of SEQ ID NOs: 30-34) of the IL-12 or variant thereof are positioned in tandem (e.g., connected via an optional peptide linker such as any of SEQ ID NOs: 227-229) at the hinge region (e.g., within the hinge region, or between the C-terminus of CH1 and the N-terminus of the hinge region) of the heavy chain. In some embodiments, there is provided an IL-12/anti-CD8 immunocytokine comprising: a) a full-length antibody specifically recognizing CD8; and b) an IL-12 or variant thereof (e.g., SEQ ID NO: 35 or 36), wherein both p35 subunit (e.g., SEQ ID NO: 29) and p40 subunit (e.g., any of SEQ ID NOs: 30-34) of the IL-12 or variant thereof are positioned in tandem (e.g., connected via an optional peptide linker such as any of SEQ ID NOs: 227-229) at the hinge region (e.g., any of SEQ ID NOs: 40-47, 50-52, and 55-59)(e.g., within the hinge region, or between the C-terminus of CH1 and the N-terminus of the hinge region) of a heavy chain of the full-length antibody; and wherein the anti-CD8 antibody comprises VH-CDR1, VH-CDR2, and VH-CDR3 of a VH comprising the sequence of SEQ ID NO: 114, and VL-CDR1, VL-CDR2, and VL-CDR3 of a VL comprising the sequence of SEQ ID NO: 115. In some embodiments, the anti-CD8 antibody comprises a VH comprising the sequence of SEQ ID NO: 114 and a VL comprising the sequence of SEQ ID NO: 115. In some embodiments, the parental anti-CD8 antibody comprises two heavy chains each comprising the sequence of SEQ ID NO: 116, and two light chains each comprising the sequence of SEQ ID NO: 117. In some embodiments, the p40 subunit of the IL-12 variant comprises the sequence of SEQ ID NO: 31. In some embodiments, the p40 subunit or variant thereof (e.g., any of SEQ ID NOs: 30-34) is at N-terminus of the p35 subunit or variant thereof (e.g., SEQ ID NO: 29) (e.g., p40-optional linker (e.g., any of SEQ ID NOs: 227-229)-p35). In some embodiments, the p35 subunit or variant thereof is at N-terminus of the p40 subunit or variant thereof (e.g., p35-optional linker (e.g., any of SEQ ID NOs: 227-229)-p40). In some embodiments, the p40 subunit and the p35 subunit of the IL-12 or variant thereof are connected by a linker. In some embodiments, the IL-12 variant comprises the sequence of SEQ ID NO: 36. In some embodiments, the heavy chain comprising the IL-12 variant positioned at the hinge region comprises the sequence of SEQ ID NO: 123. In some embodiments, there is provided an IL-12/anti-CD8 immunocytokine comprising: two light chains comprising the sequence of SEQ ID NO: 117, one heavy chain comprising an IL-12 variant positioned at the hinge region comprising the sequence of SEQ ID NO: 123, and one heavy chain comprises the sequence of SEQ ID NO: 118. In some embodiments, in the presence of binding of the antibody (or antigen-binding fragment) to CD8, the activity (binding affinity to corresponding cytokine receptor or subunit thereof, and/or biological activity) of the IL-12 or variant thereof increases at least about 20% (such as at least about any of 30%, 40%, 50%, 60%, 70%, 80%, 90%, 100%, 200%, 300%, 400%, 500%, or more) compared to that in the absence of binding of the antibody (or antigen-binding fragment) to CD8. In some embodiments, in the absence of binding of the antibody (or antigen-binding fragment) to CD8, the activity (binding affinity to corresponding cytokine receptor or subunit thereof, and/or biological activity) of the IL-12 or variant thereof positioned at the hinge region of the heavy chain is no more than about 70% (such as no more than about any of 60%, 50%, 40%, 30%, 20%, 10%, 9%, 8%, 7%, 6%, 5%, 4%, 3%, 2%, %, 0.9%, 0.8%, 0.7%, 0.6%, 0.5%, 0.4%, 0.3%, 0.2%, 0.1%, or 0%) of that of a corresponding IL-12 or variant thereof in a free state. In some embodiments, the antibody is monospecific. In some embodiments, the antibody is multispecific (e.g., bispecific). In some embodiments, the antibody is homodimeric. In some embodiments, the antibody is heterodimeric. In some embodiments, the antibody is an agonist antibody. In some embodiments, the antibody is an antagonist antibody.

[0188] In some embodiments, the antigen-binding protein is an anti-CTLA-4 antibody. Thus in some embodiments, there is provided an IL-12 immunocytokine (“IL-12/anti-CTLA-4 immunocytokine”) comprising: a) an antibody (e.g., full-length antibody, heavy chain only antibody, or antigen-binding fragment fused to an Fc domain subunit or portion thereof) specifically recognizing CTLA-4; and b) an IL-12 or variant thereof (e.g., SEQ ID NO: 35 or 36), wherein the antibody comprises a heavy chain comprising a hinge region (e.g., any of SEQ ID NOs: 40-47, 50-52, and 55-59), and wherein both p35 subunit (e.g., SEQ ID NO: 29) and p40 subunit (e.g., any of SEQ ID NOs: 30-34) of the IL-12 or variant thereof are positioned in tandem (e.g., connected via an optional peptide linker such as any of SEQ ID NOs: 227-229) at the hinge region (e.g., within the hinge region, or between the C-terminus of CH1 and the N-terminus of the hinge region) of the heavy chain. In some embodiments, there is provided an IL-12/anti-CTLA-4 immunocytokine comprising: a) a full-length antibody specifically recognizing CTLA-4; and b) an IL-12 or variant thereof (e.g., SEQ ID NO: 35 or 36), wherein both p35 subunit (e.g., SEQ ID NO: 29) and p40 subunit (e.g., any of SEQ ID NOs: 30-34) of the IL-12 or variant thereof are positioned in tandem (e.g., connected via an optional peptide linker such as any of SEQ ID NOs: 227-229) at the hinge region (e.g., any of SEQ ID NOs: 40-47, 50-52, and 55-59)(e.g., within the hinge region, or between the C-terminus of CH1 and the N-terminus of the hinge region) of a heavy chain of the full-length antibody; and wherein the anti-CTLA-4 antibody comprises VH-CDR1, VH-CDR2, and VH-CDR3 of a VH comprising the sequence of SEQ ID NO: 125, and VL-CDR1, VL-CDR2, and VL-CDR3 of a VL comprising the sequence of SEQ ID NO: 126. In some embodiments, the anti-CTLA-4 antibody comprises a VH comprising the sequence of SEQ ID NO: 125 and a VL comprising the sequence of SEQ ID NO: 126. In some embodiments, the parental anti-CTLA-4 antibody comprises two heavy chains each comprising the sequence of SEQ ID NO: 127 or 128, and two light chains each comprising the sequence of SEQ ID NO: 129. In some embodiments, the p40 subunit or variant thereof (e.g., any of SEQ ID NOs: 30-34) is at N-terminus of the p35 subunit or variant thereof (e.g., SEQ ID NO: 29) (e.g., p40-optional linker (e.g., any of SEQ ID NOs: 227-229)-p35). In some embodiments, the p35 subunit or variant thereof is at N-terminus of the p40 subunit or variant thereof (e.g., p35-optional linker (e.g., any of SEQ ID NOs: 227-229)-p40). In some embodiments, the p40 subunit and the p35 subunit of the IL-12 or variant thereof are connected by a linker. In some embodiments, the p40 subunit of the IL-12 variant comprises the sequence of SEQ ID NO: 31. In some embodiments, the IL-12 variant comprises the sequence of SEQ ID NO: 36. In some embodiments, the heavy chain comprising the IL-12 variant positioned at the hinge region comprises the sequence of SEQ ID NO: 135. In some embodiments, there is provided an IL-12/anti-CTLA-4 immunocytokine comprising: two light chains comprising the sequence of SEQ ID NO: 129, one heavy chain comprising an IL-12 variant positioned at the hinge region comprising the sequence of SEQ ID NO: 135, and one heavy chain comprises the sequence of SEQ ID NO: 130. In some embodiments, in the presence of binding of the antibody (or antigen-binding fragment) to CTLA-4, the activity (binding affinity to corresponding cytokine receptor or subunit thereof, and/or biological activity) of the IL-12 cytokine or variant thereof increases at least about 20% (such as at least about any of 30%, 40%, 50%, 60%, 70%, 80%, 90%, 100%, 200%, 300%, 400%, 500%, or more) compared to that in the absence of binding of the antibody (or antigen-binding fragment) to CTLA-4. In some embodiments, in the absence of binding of the antibody (or antigen-binding fragment) to CTLA-4, the activity (binding affinity to corresponding cytokine receptor or subunit thereof, and/or biological activity) of the IL-12 cytokine or variant thereof positioned at the hinge region of the heavy chain is no more than about 70% (such as no more than about any of 60%, 50%, 40%, 30%, 20%, 10%, 9%, 8%, 7%, 6%, 5%, 4%, 3%, 2%, 1%, 0.9%, 0.8%, 0.7%, 0.6%, 0.5%, 0.4%, 0.3%, 0.2%, 0.1%, or 0%) of that of a corresponding IL-12 cytokine or variant thereof in a free state. In some embodiments, the antibody is monospecific. In some embodiments, the antibody is multispecific (e.g., bispecific). In some embodiments, the antibody is homodimeric. In some embodiments, the antibody is heterodimeric. In some embodiments, the antibody is an agonist antibody. In some embodiments, the antibody is an antagonist antibody.

[0189] In some embodiments, the antigen-binding protein is an anti-PD-L1 antibody. Thus in some embodiments, there is provided an IL-12 immunocytokine (“IL-12/anti-PD-L1 immunocytokine”) comprising: a) an antibody (e.g., full-length antibody, heavy chain only antibody, or antigen-binding fragment fused to an Fc domain subunit or portion thereof) specifically recognizing PD-L1; and b) an IL-12 or variant thereof (e.g., SEQ ID NO: 35 or 36), wherein the antibody comprises a heavy chain comprising a hinge region (e.g., any of SEQ ID NOs: 40-47, 50-52, and 55-59), and wherein both p35 subunit (e.g., SEQ ID NO: 29) and p40 subunit (e.g., any of SEQ ID NOs: 30-34) of the IL-12 or variant thereof are positioned in tandem (e.g., connected via an optional peptide linker such as any of SEQ ID NOs: 227-229) at the hinge region (e.g., within the hinge region, or between the C-terminus of CH1 and the N-terminus of the hinge region) of the heavy chain. In some embodiments, there is provided an IL-12/anti-PD-L1 immunocytokine comprising: a) a full-length antibody specifically recognizing PD-L1; and b) an IL-12 or variant thereof (e.g., SEQ ID NO: 35 or 36), wherein both p35 subunit (e.g., SEQ ID NO: 29) and p40 subunit (e.g., any of SEQ ID NOs: 30-34) of the IL-12 or variant thereof are positioned in tandem (e.g., connected via an optional peptide linker such as any of SEQ ID NOs: 227-229) at the hinge region (e.g., any of SEQ ID NOs: 40-47, 50-52, and 55-59)(e.g., within the hinge region, or between the C-terminus of CH1 and the N-terminus of the hinge region) of a heavy chain of the full-length antibody; and wherein the anti-PD-L1 antibody comprises: i) a VH-CDR1 comprising the sequence of SEQ ID NO: 243; ii) a VH-CDR2 comprising the sequence of SEQ ID NO: 244; iii) a VH-CDR3 comprising the sequence of SEQ ID NO: 245; iv) a VL-CDR1 comprising the sequence of SEQ ID NO: 246; v) a VL-CDR2 comprising the sequence of SEQ ID NO: 247; and vi) a VL-CDR3 comprising the sequence of SEQ ID NO: 248. In some embodiments, the anti-PD-L1 antibody comprises a VH comprising the sequence of SEQ ID NO: 137 and a VL comprising the sequence of SEQ ID NO: 138. In some embodiments, the parental anti-PD-L1 antibody comprises two heavy chains each comprising the sequence of SEQ ID NO: 139, and two light chains each comprising the sequence of SEQ ID NO: 140. In some embodiments, the parental anti-PD-L1 antibody comprises two heavy chains each comprising the sequence of SEQ ID NO: 141, and two light chains each comprising the sequence of SEQ ID NO: 142. In some embodiments, the p40 subunit or variant thereof (e.g., any of SEQ ID NOs: 30-34) is at N-terminus of the p35 subunit or variant thereof (e.g., SEQ ID NO: 29) (e.g., p40-optional linker (e.g., any of SEQ ID NOs: 227-229)-p35). In some embodiments, the p35 subunit or variant thereof is at N-terminus of the p40 subunit or variant thereof (e.g., p35-optional linker (e.g., any of SEQ ID NOs: 227-229)-p40). In some embodiments, the p40 subunit and the p35 subunit of the IL-12 or variant thereof are connected by a linker. In some embodiments, the p40 subunit of the IL-12 variant comprises the sequence of SEQ ID NO: 31. In some embodiments, the IL-12 variant comprises the sequence of SEQ ID NO: 36. In some embodiments, the heavy chain comprising the IL-12 variant positioned at the hinge region comprises the sequence of SEQ ID NO: 148. In some embodiments, there is provided an IL-12/anti-PD-L1 immunocytokine comprising: two light chains comprising the sequence of SEQ ID NO: 140, one heavy chain comprising an IL-12 variant positioned at the hinge region comprising the sequence of SEQ ID NO: 148, and one heavy chain comprises the sequence of SEQ ID NO: 143. In some embodiments, in the presence of binding of the antibody (or antigen-binding fragment) to PD-L1, the activity (binding affinity to corresponding cytokine receptor or subunit thereof, and/or biological activity) of the IL-12 cytokine or variant thereof increases at least about 20% (such as at least about any of 30%, 40%, 50%, 60%, 70%, 80%, 90%, 100%, 200%, 300%, 400%, 500%, or more) compared to that in the absence of binding of the antibody (or antigen-binding fragment) to PD-L1. In some embodiments, in the absence of binding of the antibody (or antigen-binding fragment) to PD-L1, the activity (binding affinity to corresponding cytokine receptor or subunit thereof, and/or biological activity) of the IL-12 cytokine or variant thereof positioned at the hinge region of the heavy chain is no more than about 70% (such as no more than about any of 60%, 50%, 40%, 30%, 20%, 10%, 9%, 8%, 7%, 6%, 5%, 4%, 3%, 2%, 1%, 0.9%, 0.8%, 0.7%, 0.6%, 0.5%, 0.4%, 0.3%, 0.2%, 0.1%, or 0%) of that of a corresponding IL-12 cytokine or variant thereof in a free state. In some embodiments, the antibody is monospecific. In some embodiments, the antibody is multispecific (e.g., bispecific). In some embodiments, the antibody is homodimeric. In some embodiments, the antibody is heterodimeric.

[0190] In some embodiments, the antigen-binding protein is an anti-CD25 antibody. Thus in some embodiments, there is provided an IL-12 immunocytokine (“IL-12/anti-CD25 immunocytokine”) comprising: a) an antibody (e.g., full-length antibody, heavy chain only antibody, or antigen-binding fragment fused to an Fc domain subunit or portion thereof) specifically recognizing CD25; and b) an IL-12 or variant thereof (e.g., SEQ ID NO: 35 or 36), wherein the antibody comprises a heavy chain comprising a hinge region (e.g., any of SEQ ID NOs: 40-47, 50-52, and 55-59), and wherein both p35 subunit (e.g., SEQ ID NO: 29) and p40 subunit (e.g., any of SEQ ID NOs: 30-34) of the IL-12 or variant thereof are positioned in tandem (e.g., connected via an optional peptide linker such as any of SEQ ID NOs: 227-229) at the hinge region (e.g., within the hinge region, or between the C-terminus of CH1 and the N-terminus of the hinge region) of the heavy chain, or between the C-terminus of CH1 and the N-terminus of the hinge region) of the heavy chain. In some embodiments, there is provided an IL-12/anti-CD25 immunocytokine comprising: a) a full-length antibody specifically recognizing CD25; and b) an IL-12 or variant thereof (e.g., SEQ ID NO: 35 or 36), wherein both p35 subunit (e.g., SEQ ID NO: 29) and p40 subunit (e.g., any of SEQ ID NOs: 30-34) of the IL-12 or variant thereof are positioned in tandem (e.g., connected via an optional peptide linker such as any of SEQ ID NOs: 227-229) at the hinge region (e.g., any of SEQ ID NOs: 40-47, 50-52, and 55-59)(e.g., within the hinge region, or between the C-terminus of CH1 and the N-terminus of the hinge region) of a heavy chain of the full-length antibody; and wherein the anti-CD25 antibody comprises VH-CDR1, VH-CDR2, and VH-CDR3 of a VH comprising the sequence of SEQ ID NO: 162, and VL-CDR1, VL-CDR2, and VL-CDR3 of a VL comprising the sequence of SEQ ID NO: 163. In some embodiments, the anti-CD25 antibody comprises a VH comprising the sequence of SEQ ID NO: 162 and a VL comprising the sequence of SEQ ID NO: 163. In some embodiments, the parental anti-CD25 antibody comprises two heavy chains each comprising the sequence of SEQ ID NO: 164, and two light chains each comprising the sequence of SEQ ID NO: 165. In some embodiments, the parental anti-CD25 antibody comprises two heavy chains each comprising the sequence of SEQ ID NO: 166, and two light chains each comprising the sequence of SEQ ID NO: 167. In some embodiments, the p40 subunit or variant thereof (e.g., any of SEQ ID NOs: 30-34) is at N-terminus of the p35 subunit or variant thereof (e.g., SEQ ID NO: 29) (e.g., p40-optional linker (e.g., any of SEQ ID NOs: 227-229)-p35). In some embodiments, the p35 subunit or variant thereof is at N-terminus of the p40 subunit or variant thereof (e.g., p35-optional linker (e.g., any of SEQ ID NOs: 227-229)-p40). In some embodiments, the p40 subunit and the p35 subunit of the IL-12 or variant thereof are connected by a linker. In some embodiments, the p40 subunit of the IL-12 variant comprises the sequence of SEQ ID NO: 31. In some embodiments, the IL-12 variant comprises the sequence of SEQ ID NO: 36. In some embodiments, the heavy chain comprising the IL-12 variant positioned at the hinge region comprises the sequence of SEQ ID NO: 173. In some embodiments, there is provided an IL-12/anti-CD25 immunocytokine comprising: two light chains comprising the sequence of SEQ ID NO: 165, one heavy chain comprising an IL-12 variant positioned at the hinge region comprising the sequence of SEQ ID NO: 173, and one heavy chain comprises the sequence of SEQ ID NO: 168. In some embodiments, in the presence of binding of the antibody (or antigen-binding fragment) to CD25, the activity (binding affinity to corresponding cytokine receptor or subunit thereof, and/or biological activity) of the IL-12 cytokine or variant thereof increases at least about 20% (such as at least about any of 30%, 40%, 50%, 60%, 70%, 80%, 90%, 100%, 200%, 300%, 400%, 500%, or more) compared to that in the absence of binding of the antibody (or antigen-binding fragment) to CD25. In some embodiments, in the absence of binding of the antibody (or antigen-binding fragment) to CD25, the activity (binding affinity to corresponding cytokine receptor or subunit thereof, and/or biological activity) of the IL-12 cytokine or variant thereof positioned at the hinge region of the heavy chain is no more than about 70% (such as no more than about any of 60%, 50%, 40%, 30%, 20%, 10%, 9%, 8%, 7%, 6%, 5%, 4%, 3%, 2%, 1%, 0.9%, 0.8%, 0.7%, 0.6%, 0.5%, 0.4%, 0.3%, 0.2%, 0.1%, or 0%) of that of a corresponding IL-12 cytokine or variant thereof in a free state. In some embodiments, the antibody is monospecific. In some embodiments, the antibody is multispecific (e.g., bispecific). In some embodiments, the antibody is homodimeric. In some embodiments, the antibody is heterodimeric. In some embodiments, the antibody is an agonist antibody. In some embodiments, the antibody is an antagonist antibody.

[0191] In some embodiments, the antigen-binding protein is a PD-L2 (e.g., PD-L2 extracellular domain)-hinge-Fc fusion protein. Thus in some embodiments, there is provided an IL-12 immunocytokine (“IL-12/PD-L2-Fc immunocytokine”) comprising: a) a PD-L2-hinge-Fc fusion polypeptide comprising from N′ to C′: a PD-L2 (e.g., SEQ ID NO: 176) specifically recognizing PD-1, a hinge region (e.g., any of SEQ ID NOs: 40-47, 50-52, and 55-59), and an Fc domain subunit or portion thereof; and b) an IL-12 or variant thereof (e.g., SEQ ID NO: 35 or 36), wherein both p35 subunit (e.g., SEQ ID NO: 29) and p40 subunit (e.g., any of SEQ ID NOs: 30-34) of the IL-12 or variant thereof are positioned in tandem (e.g., connected via an optional peptide linker such as any of SEQ ID NOs: 227-229) at the hinge region (e.g., within the hinge region, or between the C-terminus of PD-L2 and the N-terminus of the hinge region) of the PD-L2-hinge-Fc fusion polypeptide. In some embodiments, the parental PD-L2-hinge-Fc fusion protein comprises two PD-L2-hinge-Fc fusion polypeptides each comprising the sequence of SEQ ID NO: 177. In some embodiments, the p40 subunit or variant thereof (e.g., any of SEQ ID NOs: 30-34) is at N-terminus of the p35 subunit or variant thereof (e.g., SEQ ID NO: 29) (e.g., p40-optional linker (e.g., any of SEQ ID NOs: 227-229)-p35). In some embodiments, the p35 subunit or variant thereof is at N-terminus of the p40 subunit or variant thereof (e.g., p35-optional linker (e.g., any of SEQ ID NOs: 227-229)-p40). In some embodiments, the p40 subunit and the p35 subunit of the IL-12 or variant thereof are connected by a linker. In some embodiments, the p40 subunit of the IL-12 variant comprises the sequence of SEQ ID NO: 31. In some embodiments, the IL-12 variant comprises the sequence of SEQ ID NO: 36. In some embodiments, the PD-L2-hinge-Fc fusion polypeptide comprising the IL-12 variant positioned at the hinge region comprises the sequence of SEQ ID NO: 186. In some embodiments, there is provided an IL-12/PD-L2-Fc immunocytokine comprising: a PD-L2-hinge-Fc fusion polypeptide comprising an IL-12 variant positioned at the hinge region comprises the sequence of SEQ ID NO: 186, and a PD-L2-hinge-Fc fusion polypeptide comprises the sequence of SEQ ID NO: 185. In some embodiments, the p40 subunit of the IL-12 variant comprises the sequence of SEQ ID NO: 33. In some embodiments, the IL-12 variant comprises the sequence of SEQ ID NO: 275. In some embodiments, the PD-L2-hinge-Fc fusion polypeptide comprising the IL-12 variant positioned at the hinge region comprises the sequence of SEQ ID NO: 274. In some embodiments, there is provided an IL-12/PD-L2-Fc immunocytokine comprising: a PD-L2-hinge-Fc fusion polypeptide comprising an IL-12 variant positioned at the hinge region comprises the sequence of SEQ ID NO: 274, and a PD-L2-hinge-Fc fusion polypeptide comprises the sequence of SEQ ID NO: 185. In some embodiments, in the presence of binding of the PD-L2 ligand to PD-1, the activity (binding affinity to corresponding cytokine receptor or subunit thereof, and/or biological activity) of the IL-12 cytokine or variant thereof increases at least about 20% (such as at least about any of 30%, 40%, 50%, 60%, 70%, 80%, 90%, 100%, 200%, 300%, 400%, 500%, or more) compared to that in the absence of binding of the PD-L2 ligand to PD-1. In some embodiments, in the absence of binding of the PD-L2 ligand to PD-1, the activity (binding affinity to corresponding cytokine receptor or subunit thereof, and/or biological activity) of the IL-12 cytokine or variant thereof positioned at the hinge region is no more than about 70% (such as no more than about any of 60%, 50%, 40%, 30%, 20%, 10%, 9%, 8%, 7%, 6%, 5%, 4%, 3%, 2%, 1%, 0.9%, 0.8%, 0.7%, 0.6%, 0.5%, 0.4%, 0.3%, 0.2%, 0.1%, or 0%) of that of a corresponding IL-12 cytokine or variant thereof in a free state. In some embodiments, the PD-L2-hinge-Fc fusion protein is monospecific. In some embodiments, the PD-L2-hinge-Fc fusion protein is multispecific (e.g., bispecific). In some embodiments, the PD-L2-hinge-Fc fusion protein is homodimeric. In some embodiments, the PD-L2-hinge-Fc fusion protein is heterodimeric. In some embodiments, the PD-L2 moiety is an agonist that can stimulate or enhance PD-1 signaling. In some embodiments, the PD-L2 moiety is an antagonist that can reduce or block PD-1 signaling.

[0192] In some embodiments, the cytokine or variant thereof is IL-23 or variant thereof. In some embodiments, there is provided an IL-23 immunocytokine comprising: a) an antigen-binding protein (e.g., antibody such as full-length antibody, or antigen-binding fragment-hinge-Fc fusion protein such as ligand/receptor-hinge-Fc fusion protein) specifically recognizing a target antigen (e.g., CTLA-4, PD-L1, PD-L2, CD25, HER2, PD-1, CD3, CD4, CD123, or CD8); and b) an IL-23 or variant thereof (e.g., SEQ ID NO: 38 or 39), wherein the antigen-binding protein comprises an antigen-binding polypeptide (e.g., antibody heavy chain, or antigen-binding fragment-hinge-Fc fusion polypeptide such as ligand/receptor-hinge-Fc fusion polypeptide) comprising from N′ to C′: an antigen-binding fragment (e.g., ligand such as PD-L2 extracellular domain, receptor, VHH, scFv, or VH), a hinge region, and an Fc domain subunit or portion thereof (e.g., CH2+CH3, or CH2 only), and wherein both p19 subunit (e.g., SEQ ID NO: 37) and p40 subunit (e.g., any of SEQ ID NOs: 30-34) of the IL-23 or variant thereof are positioned in tandem (e.g., connected via an optional peptide linker such as any of SEQ ID NOs: 227-229) at (e.g., at the N′ of, at the C′ of, or within) the hinge region. In some embodiments, the antigen-binding protein is an antibody (e.g., full-length antibody) specifically recognizing the target antigen, the antigen-binding polypeptide comprising the hinge region is a heavy chain of the antibody, and both p19 subunit (e.g., SEQ ID NO: 37) and p40 subunit (e.g., any of SEQ ID NOs: 30-34) of the IL-23 or variant thereof are positioned in tandem (e.g., connected via an optional peptide linker such as any of SEQ ID NOs: 227-229) at the hinge region of the heavy chain. In some embodiments, the antigen-binding fragment is a ligand, and the target antigen is a receptor specifically recognized by the ligand. In some embodiments, the antigen-binding fragment is a receptor, and the target antigen is a ligand specifically recognized by the receptor. In some embodiments, there is provided an IL-23 immunocytokine comprising: a) an antibody (e.g., full-length antibody, heavy chain only antibody, or antigen-binding fragment fused to an Fc domain subunit or portion thereof via a hinge region) specifically recognizing a target antigen (e.g., CTLA-4, PD-L1, PD-L2, CD25, HER2, PD-1, CD3, CD4, CD123, or CD8); and b) an IL-23 or variant thereof (e.g., SEQ ID NO: 38 or 39), wherein the antibody comprises a heavy chain comprising a hinge region, and wherein both p19 subunit (e.g., SEQ ID NO: 37) and p40 subunit (e.g., any of SEQ ID NOs: 30-34) of the IL-23 or variant thereof are positioned in tandem (e.g., connected via an optional peptide linker such as any of SEQ ID NOs: 227-229) at the hinge region (e.g., within the hinge region, or between the C-terminus of CH1 and the N-terminus of the hinge region) of the heavy chain. In some embodiments, there is provided an IL-23 immunocytokine comprising: a) an antibody specifically recognizing a target antigen (e.g., CTLA-4, PD-L1, PD-L2, CD25, HER2, PD-1, CD3, CD4, CD123, or CD8); and b) an IL-23 or variant thereof (e.g., SEQ ID NO: 38 or 39), wherein the antibody comprises a heavy chain comprising from N-terminus to C-terminus: a VH domain, optionally a CH1 domain, [a first subunit of IL-23 or variant thereof (e.g., p40, such as any of SEQ ID NOs: 30-34), optionally a linker (e.g., peptide linker), a second subunit of IL-23 or variant thereof (e.g., p19, such as SEQ ID NO: 37)] at a hinge region, a CH2 domain, and optionally a CH3 domain. In some embodiments, there is provided an IL-23 immunocytokine comprising: a) a full-length antibody specifically recognizing a target antigen (e.g., CTLA-4, PD-L1, PD-L2, CD25, HER2, PD-1, CD3, CD4, CD123, or CD8); and b) an IL-23 or variant thereof (e.g., SEQ ID NO: 38 or 39), wherein both p19 subunit (e.g., SEQ ID NO: 37) and p40 subunit (e.g., any of SEQ ID NOs: 30-34) of the IL-23 or variant thereof are positioned in tandem (e.g., connected via an optional peptide linker such as any of SEQ ID NOs: 227-229) at the hinge region (e.g., between the C-terminus of CH1 and the N-terminus of the hinge region) of a heavy chain of the full-length antibody. In some embodiments, there is provided an IL-23 immunocytokine comprising: a) a full-length antibody specifically recognizing a target antigen (e.g., CTLA-4, PD-L1, PD-L2, CD25, HER2, PD-1, CD3, CD4, CD123, or CD8); and b) an IL-23 variant comprising one or more mutations within the p40 subunit at a position selected from the group consisting of E45, Q56, V57, K58, E59, F60, G61, D62, A63, G64, Q65, and C177 relative to a wildtype p40 subunit comprising the sequence of SEQ ID NO: 30, wherein both p19 subunit (e.g., SEQ ID NO: 37) and p40 subunit of the IL-23 variant are positioned in tandem (e.g., connected via an optional peptide linker such as any of SEQ ID NOs: 227-229) at the hinge region (e.g., within the hinge region, or between the C-terminus of CH1 and the N-terminus of the hinge region) of a heavy chain of the full-length antibody. In some embodiments, there is provided an IL-23 immunocytokine comprising: a) a full-length antibody specifically recognizing a target antigen (e.g., CTLA-4, PD-L1, PD-L2, CD25, HER2, PD-1, CD3, CD4, CD123, or CD8); and b) an IL-23 variant comprising one or more mutations within the p40 subunit selected from the group consisting of Q56A, V57A, K58A, E59A, F60A, G61A, D62A, A63S, G64A, and Q65A relative to a wildtype p40 subunit comprising the sequence of SEQ ID NO: 30, wherein both p19 subunit (e.g., SEQ ID NO: 37) and p40 subunit of the IL-23 variant are positioned in tandem (e.g., connected via an optional peptide linker such as any of SEQ ID NOs: 227-229) at the hinge region (e.g., within the hinge region, or between the C-terminus of CH1 and the N-terminus of the hinge region) of a heavy chain of the full-length antibody. In some embodiments, there is provided an IL-23 immunocytokine comprising: a) a full-length antibody specifically recognizing a target antigen (e.g., CTLA-4, PD-L1, PD-L2, CD25, HER2, PD-1, CD3, CD4, CD123, or CD8); and b) an IL-23 variant, wherein the p40 subunit of the IL-23 variant comprises the sequence of any of SEQ ID NOs: 31-34, wherein both p19 subunit (e.g., SEQ ID NO: 37) and p40 subunit of the IL-23 variant are positioned in tandem (e.g., connected via an optional peptide linker such as any of SEQ ID NOs: 227-229) at the hinge region (e.g., within the hinge region, or between the C-terminus of CH1 and the N-terminus of the hinge region) of a heavy chain of the full-length antibody. In some embodiments, there is provided an IL-23 immunocytokine comprising: a) a full-length antibody specifically recognizing a target antigen (e.g., CTLA-4, PD-L1, PD-L2, CD25, HER2, PD-1, CD3, CD4, CD123, or CD8); and b) an IL-23 variant comprising an E59A/F60A mutation within the p40 subunit relative to a wildtype p40 subunit comprising the sequence of SEQ ID NO: 30, wherein both p19 subunit (e.g., SEQ ID NO: 37) and p40 subunit of the IL-23 variant are positioned in tandem (e.g., connected via an optional peptide linker such as any of SEQ ID NOs: 227-229) at the hinge region (e.g., within the hinge region, or between the C-terminus of CH1 and the N-terminus of the hinge region) of a heavy chain of the full-length antibody. In some embodiments, there is provided an IL-23 immunocytokine comprising: a) a full-length antibody specifically recognizing a target antigen (e.g., CTLA-4, PD-L1, PD-L2, CD25, HER2, PD-1, CD3, CD4, CD123, or CD8); and b) an IL-23 variant, wherein the p40 subunit of the IL-23 variant comprises the sequence of SEQ ID NO: 31, and wherein both p19 subunit (e.g., SEQ ID NO: 37) and p40 subunit of the IL-23 variant are positioned in tandem (e.g., connected via an optional peptide linker such as any of SEQ ID NOs: 227-229) at the hinge region (e.g., within the hinge region, or between the C-terminus of CH1 and the N-terminus of the hinge region) of a heavy chain of the full-length antibody. In some embodiments, the p40 subunit or variant thereof (e.g., any of SEQ ID NOs: 30-34) is at N-terminus of the p19 subunit or variant thereof (e.g., SEQ ID NO: 37) (e.g., p40-optional linker (e.g., any of SEQ ID NOs: 227-229)-p19). In some embodiments, the p19 subunit or variant thereof is at N-terminus of the p40 subunit or variant thereof (e.g., p19-optional linker (e.g., any of SEQ ID NOs: 227-229)-p40). In some embodiments, the p40 subunit and the p19 subunit of the IL-23 or variant thereof are connected by a linker. In some embodiments, there is provided an IL-23 immunocytokine comprising: a) a full-length antibody specifically recognizing a target antigen (e.g., CTLA-4, PD-L1, PD-L2, CD25, HER2, PD-1, CD3, CD4, CD123, or CD8); and b) an IL-23 variant comprising the sequence of SEQ ID NO: 39, wherein the IL-23 variant is positioned at the hinge region (e.g., within the hinge region, or between the C-terminus of CH1 and the N-terminus of the hinge region) of a heavy chain of the full-length antibody. In some embodiments, the activity (binding affinity to corresponding cytokine receptor or subunit thereof, and/or biological activity) of the IL-23 variant in a free state is no more than about 80% (such as no more than about any of 70%, 60%, 50%, 40%, 30%, 20%, 10%, or 5%) of that of a corresponding wildtype IL-23 in a free state. In some embodiments, the antigen-binding protein (e.g., antibody or fragment thereof, or antigen-binding fragment-hinge-Fc fusion protein such as ligand/receptor-hinge-Fc fusion protein) is monospecific. In some embodiments, the antigen-binding protein is multispecific (e.g., bispecific). In some embodiments, the parental antigen-binding protein (e.g., antibody such as full-length antibody, or antigen-binding fragment-hinge-Fc fusion protein such as ligand/receptor-hinge-Fc fusion protein) is homodimeric. In some embodiments, the parental antigen-binding protein is heterodimeric. In some embodiments, the antigen-binding protein is an agonist. In some embodiments, the antigen-binding protein is an antagonist. In some embodiments, the hinge region comprises the sequence of any of SEQ ID NOs: 40-47, 50-52, and 55-59.

[0193] In some embodiments, the antigen-binding protein is an anti-HER2 antibody. Thus in some embodiments, there is provided an IL-23 immunocytokine (“IL-23/anti-HER2 immunocytokine”) comprising: a) an antibody (e.g., full-length antibody, heavy chain only antibody, or antigen-binding fragment fused to an Fc domain subunit or portion thereof) specifically recognizing HER2; and b) an IL-23 or variant thereof (e.g., SEQ ID NO: 38 or 39), wherein the antibody comprises a heavy chain comprising a hinge region (e.g., any of SEQ ID NOs: 40-47, 50-52, and 55-59), and wherein both p19 subunit (e.g., SEQ ID NO: 37) and p40 subunit (e.g., any of SEQ ID NOs: 30-34) of the IL-23 or variant thereof are positioned in tandem (e.g., connected via an optional peptide linker such as any of SEQ ID NOs: 227-229) at the hinge region (e.g., within the hinge region, or between the C-terminus of CH1 and the N-terminus of the hinge region) of the heavy chain. In some embodiments, there is provided an IL-23/anti-HER2 immunocytokine comprising: a) a full-length antibody specifically recognizing HER2; and b) an IL-23 or variant thereof (e.g., SEQ ID NO: 38 or 39), wherein both p19 subunit (e.g., SEQ ID NO: 37) and p40 subunit (e.g., any of SEQ ID NOs: 30-34) of the IL-23 or variant thereof are positioned in tandem (e.g., connected via an optional peptide linker such as any of SEQ ID NOs: 227-229) at the hinge region (e.g., any of SEQ ID NOs: 40-47, 50-52, and 55-59)(e.g., within the hinge region, or between the C-terminus of CH1 and the N-terminus of the hinge region) of a heavy chain of the full-length antibody; and wherein the anti-HER2 antibody comprises: i) a VH-CDR1 comprising the sequence of SEQ ID NO: 188; ii) a VH-CDR2 comprising the sequence of SEQ ID NO: 189; iii) a VH-CDR3 comprising the sequence of SEQ ID NO: 190; iv) a VL-CDR1 comprising the sequence of SEQ ID NO: 191; v) a VL-CDR2 comprising the sequence of SEQ ID NO: 192; and vi) a VL-CDR3 comprising the sequence of SEQ ID NO: 193. In some embodiments, the anti-HER2 antibody or antigen binding fragment thereof comprises a VH comprising the sequence of SEQ ID NO: 150 and a VL comprising the sequence of SEQ ID NO: 151. In some embodiments, the parental anti-HER2 antibody comprises two heavy chains each comprising the sequence of SEQ ID NO: 152 or 153, and two light chains each comprising the sequence of SEQ ID NO: 154.

[0194] In some embodiments, the p40 subunit or variant thereof (e.g., any of SEQ ID NOs: 30-34) is at N-terminus of the p19 subunit or variant thereof (e.g., SEQ ID NO: 37) (e.g., p40-optional linker (e.g., any of SEQ ID NOs: 227-229)-p19). In some embodiments, the p19 subunit or variant thereof is at N-terminus of the p40 subunit or variant thereof (e.g., p19-optional linker (e.g., any of SEQ ID NOs: 227-229)-p40). In some embodiments, the p40 subunit of the IL-23 variant comprises the sequence of SEQ ID NO: 31. In some embodiments, the p40 subunit and the p19 subunit of the IL-23 or variant thereof are connected by a linker. In some embodiments, the IL-23 variant comprises the sequence of SEQ ID NO: 39. In some embodiments, the heavy chain comprising the IL-23 variant positioned at the hinge region comprises the sequence of SEQ ID NO: 161. In some embodiments, there is provided an IL-23/anti-HER2 immunocytokine comprising: two light chains comprising the sequence of SEQ ID NO: 154, one heavy chain comprising an IL-23 variant positioned at the hinge region comprising the sequence of SEQ ID NO: 161, and one heavy chain comprises the sequence of SEQ ID NO: 155. In some embodiments, in the presence of binding of the antibody (or antigen-binding fragment) to HER2, the activity (binding affinity to corresponding cytokine receptor or subunit thereof, and/or biological activity) of the IL-23 cytokine or variant thereof increases at least about 20% (such as at least about any of 30%, 40%, 50%, 60%, 70%, 80%, 90%, 100%, 200%, 300%, 400%, 500%, or more) compared to that in the absence of binding of the antibody (or antigen-binding fragment) to HER2. In some embodiments, in the absence of binding of the antibody (or antigen-binding fragment) to HER2, the activity (binding affinity to corresponding cytokine receptor or subunit thereof, and/or biological activity) of the IL-23 cytokine or variant thereof positioned at the hinge region of the heavy chain is no more than about 70% (such as no more than about any of 60%, 50%, 40%, 30%, 20%, 10%, 9%, 8%, 7%, 6%, 5%, 4%, 3%, 2%, 1%, 0.9%, 0.8%, 0.7%, 0.6%, 0.5%, 0.4%, 0.3%, 0.2%, 0.1%, or 0%) of that of a corresponding IL-23 cytokine or variant thereof in a free state. In some embodiments, the antibody is monospecific. In some embodiments, the antibody is multispecific (e.g., bispecific). In some embodiments, the antibody is homodimeric. In some embodiments, the antibody is heterodimeric. In some embodiments, the antibody is an agonist antibody. In some embodiments, the antibody is an antagonist antibody.

[0195] In some embodiments, the antigen-binding protein is an anti-CD3 antibody. Thus in some embodiments, there is provided an IL-23 immunocytokine (“IL-23/anti-CD3 immunocytokine”) comprising: a) an antibody (e.g., full-length antibody, heavy chain only antibody, or antigen-binding fragment fused to an Fc domain subunit or portion thereof) specifically recognizing CD3; and b) an IL-23 or variant thereof (e.g., SEQ ID NO: 38 or 39), wherein the antibody comprises a heavy chain comprising a hinge region (e.g., any of SEQ ID NOs: 40-47, 50-52, and 55-59), and wherein both p19 subunit (e.g., SEQ ID NO: 37) and p40 subunit (e.g., any of SEQ ID NOs: 30-34) of the IL-23 or variant thereof are positioned in tandem (e.g., connected via an optional peptide linker such as any of SEQ ID NOs: 227-229) at the hinge region (e.g., within the hinge region, or between the C-terminus of CH1 and the N-terminus of the hinge region) of the heavy chain. In some embodiments, there is provided an IL-23/anti-CD3 immunocytokine comprising: a) a full-length antibody specifically recognizing CD3; and b) an IL-23 or variant thereof (e.g., SEQ ID NO: 38 or 39), wherein both p19 subunit (e.g., SEQ ID NO: 37) and p40 subunit (e.g., any of SEQ ID NOs: 30-34) of the IL-23 or variant thereof are positioned in tandem (e.g., connected via an optional peptide linker such as any of SEQ ID NOs: 227-229) at the hinge region (e.g., any of SEQ ID NOs: 40-47, 50-52, and 55-59)(e.g., within the hinge region, or between the C-terminus of CH1 and the N-terminus of the hinge region) of a heavy chain of the full-length antibody; and wherein the anti-CD3 antibody comprises: i) a VH-CDR1 comprising the sequence of SEQ ID NO: 85; ii) a VH-CDR2 comprising the sequence of SEQ ID NO: 86; iii) a VH-CDR3 comprising the sequence of SEQ ID NO: 87; iv) a VL-CDR1 comprising the sequence of SEQ ID NO: 88; v) a VL-CDR2 comprising the sequence of SEQ ID NO: 89; and vi) a VL-CDR3 comprising the sequence of SEQ ID NO: 90. In some embodiments, the anti-CD3 antibody comprises a VH comprising the sequence of SEQ ID NO: 91 and a VL comprising the sequence of SEQ ID NO: 92. In some embodiments, the parental anti-CD3 antibody comprises two heavy chains each comprising the sequence of SEQ ID NO: 93, and two light chains each comprising the sequence of SEQ ID NO: 94. In some embodiments, the p40 subunit or variant thereof (e.g., any of SEQ ID NOs: 30-34) is at N-terminus of the p19 subunit or variant thereof (e.g., SEQ ID NO: 37) (e.g., p40-optional linker (e.g., any of SEQ ID NOs: 227-229)-p19). In some embodiments, the p19 subunit or variant thereof is at N-terminus of the p40 subunit or variant thereof (e.g., p19-optional linker (e.g., any of SEQ ID NOs: 227-229)-p40). In some embodiments, the p40 subunit of the IL-23 variant comprises the sequence of SEQ ID NO: 31. In some embodiments, the p40 subunit and the p19 subunit of the IL-23 or variant thereof are connected by a linker. In some embodiments, the IL-23 variant comprises the sequence of SEQ ID NO: 39. In some embodiments, the heavy chain comprising the IL-23 variant positioned at the hinge region comprises the sequence of SEQ ID NO: 101. In some embodiments, there is provided an IL-23/anti-CD3 immunocytokine comprising: two light chains comprising the sequence of SEQ ID NO: 94, one heavy chain comprising an IL-23 variant positioned at the hinge region comprising the sequence of SEQ ID NO: 101, and one heavy chain comprises the sequence of SEQ ID NO: 95. In some embodiments, in the presence of binding of the antibody (or antigen-binding fragment) to CD3, the activity (binding affinity to corresponding cytokine receptor or subunit thereof, and/or biological activity) of the IL-23 cytokine or variant thereof increases at least about 20% (such as at least about any of 30%, 40%, 50%, 60%, 70%, 80%, 90%, 100%, 200%, 300%, 400%, 500%, or more) compared to that in the absence of binding of the antibody (or antigen-binding fragment) to CD3. In some embodiments, in the absence of binding of the antibody (or antigen-binding fragment) to CD3, the activity (binding affinity to corresponding cytokine receptor or subunit thereof, and/or biological activity) of the IL-23 cytokine or variant thereof positioned at the hinge region of the heavy chain is no more than about 70% (such as no more than about any of 60%, 50%, 40%, 30%, 20%, 10%, 9%, 8%, 7%, 6%, 5%, 4%, 3%, 2%, %, 0.9%, 0.8%, 0.7%, 0.6%, 0.5%, 0.4%, 0.3%, 0.2%, 0.1%, or 0%) of that of a corresponding IL-23 cytokine or variant thereof in a free state. In some embodiments, the antibody is monospecific. In some embodiments, the antibody is multispecific (e.g., bispecific). In some embodiments, the antibody is homodimeric. In some embodiments, the antibody is heterodimeric. In some embodiments, the antibody is an agonist antibody. In some embodiments, the antibody is an antagonist antibody.

[0196] In some embodiments, the antibody is an anti-PD-1 antibody. Thus in some embodiments, there is provided an IL-23 immunocytokine (“IL-23/anti-PD-1 immunocytokine”) comprising: a) an antibody (e.g., full-length antibody, heavy chain only antibody, or antigen-binding fragment fused to an Fc domain subunit or portion thereof) specifically recognizing PD-1; and b) an IL-23 or variant thereof (e.g., SEQ ID NO: 38 or 39), wherein the antibody comprises a heavy chain comprising a hinge region (e.g., any of SEQ ID NOs: 40-47, 50-52, and 55-59), and wherein both p19 subunit (e.g., SEQ ID NO: 37) and p40 subunit (e.g., any of SEQ ID NOs: 30-34) of the IL-23 or variant thereof are positioned in tandem (e.g., connected via an optional peptide linker such as any of SEQ ID NOs: 227-229) at the hinge region (e.g., within the hinge region, or between the C-terminus of CH1 and the N-terminus of the hinge region) of the heavy chain. In some embodiments, there is provided an IL-23/anti-PD-1 immunocytokine comprising: a) a full-length antibody specifically recognizing PD-1; and b) an IL-23 or variant thereof (e.g., SEQ ID NO: 38 or 39), wherein both p19 subunit (e.g., SEQ ID NO: 37) and p40 subunit (e.g., any of SEQ ID NOs: 30-34) of the IL-23 or variant thereof are positioned in tandem (e.g., connected via an optional peptide linker such as any of SEQ ID NOs: 227-229) at the hinge region (e.g., any of SEQ ID NOs: 40-47, 50-52, and 55-59)(e.g., within the hinge region, or between the C-terminus of CH1 and the N-terminus of the hinge region) of a heavy chain of the full-length antibody; and wherein the anti-PD-1 antibody comprises VH-CDR1, VH-CDR2, and VH-CDR3 of a VH comprising the sequence of SEQ ID NO: 102, and VL-CDR1, VL-CDR2, and VL-CDR3 of a VL comprising the sequence of SEQ ID NO: 103. In some embodiments, the anti-PD-1 antibody comprises a VH comprising the sequence of SEQ ID NO: 102 and a VL comprising the sequence of SEQ ID NO: 103. In some embodiments, the parental anti-PD-1 antibody comprises two heavy chains each comprising the sequence of SEQ ID NO: 104 or 105, and two light chains each comprising the sequence of SEQ ID NO: 106. In some embodiments, the p40 subunit of the IL-23 variant comprises the sequence of SEQ ID NO: 31. In some embodiments, the p40 subunit or variant thereof (e.g., any of SEQ ID NOs: 30-34) is at N-terminus of the p19 subunit or variant thereof (e.g., SEQ ID NO: 37) (e.g., p40-optional linker (e.g., any of SEQ ID NOs: 227-229)-p19). In some embodiments, the p19 subunit or variant thereof is at N-terminus of the p40 subunit or variant thereof (e.g., p19-optional linker (e.g., any of SEQ ID NOs: 227-229)-p40). In some embodiments, the p40 subunit and the p19 subunit of the IL-23 or variant thereof are connected by a linker. In some embodiments, the IL-23 variant comprises the sequence of SEQ ID NO: 39. In some embodiments, the heavy chain comprising the IL-23 variant positioned at the hinge region comprises the sequence of SEQ ID NO: 113. In some embodiments, there is provided an IL-23/anti-PD-1 immunocytokine comprising: two light chains comprising the sequence of SEQ ID NO: 106, one heavy chain comprising an IL-23 variant positioned at the hinge region comprising the sequence of SEQ ID NO: 113, and one heavy chain comprises the sequence of SEQ ID NO: 107. In some embodiments, in the presence of binding of the antibody (or antigen-binding fragment) to PD-1, the activity (binding affinity to corresponding cytokine receptor or subunit thereof, and/or biological activity) of the IL-23 or variant thereof increases at least about 20% (such as at least about any of 30%, 40%, 50%, 60%, 70%, 80%, 90%, 100%, 200%, 300%, 400%, 500%, or more) compared to that in the absence of binding of the antibody (or antigen-binding fragment) to PD-1. In some embodiments, in the absence of binding of the antibody (or antigen-binding fragment) to PD-1, the activity (binding affinity to corresponding cytokine receptor or subunit thereof, and/or biological activity) of the IL-23 or variant thereof positioned at the hinge region of the heavy chain is no more than about 70% (such as no more than about any of 60%, 50%, 40%, 30%, 20%, 10%, 9%, 8%, 7%, 6%, 5%, 4%, 3%, 2%, 1%, 0.9%, 0.8%, 0.7%, 0.6%, 0.5%, 0.4%, 0.3%, 0.2%, 0.1%, or 0%) of that of a corresponding IL-23 or variant thereof in a free state. In some embodiments, the antibody is monospecific. In some embodiments, the antibody is multispecific (e.g., bispecific). In some embodiments, the antibody is homodimeric. In some embodiments, the antibody is heterodimeric. In some embodiments, the antibody is an agonist antibody. In some embodiments, the antibody is an antagonist antibody.

[0197] In some embodiments, the antibody is an anti-CD4 antibody. Thus in some embodiments, there is provided an IL-23 immunocytokine (“IL-23/anti-CD4 immunocytokine”) comprising: a) an antibody (e.g., full-length antibody, heavy chain only antibody, or antigen-binding fragment fused to an Fc domain subunit or portion thereof) specifically recognizing CD4; and b) an IL-23 or variant thereof (e.g., SEQ ID NO: 38 or 39), wherein the antibody comprises a heavy chain comprising a hinge region (e.g., any of SEQ ID NOs: 40-47, 50-52, and 55-59), and wherein both p19 subunit (e.g., SEQ ID NO: 37) and p40 subunit (e.g., any of SEQ ID NOs: 30-34) of the IL-23 or variant thereof are positioned in tandem (e.g., connected via an optional peptide linker such as any of SEQ ID NOs: 227-229) at the hinge region (e.g., within the hinge region, or between the C-terminus of CH1 and the N-terminus of the hinge region) of the heavy chain. In some embodiments, there is provided an IL-23/anti-CD4 immunocytokine comprising: a) a full-length antibody specifically recognizing CD4; and b) an IL-23 or variant thereof (e.g., SEQ ID NO: 38 or 39), wherein both p19 subunit (e.g., SEQ ID NO: 37) and p40 subunit (e.g., any of SEQ ID NOs: 30-34) of the IL-23 or variant thereof are positioned in tandem (e.g., connected via an optional peptide linker such as any of SEQ ID NOs: 227-229) at the hinge region (e.g., any of SEQ ID NOs: 40-47, 50-52, and 55-59)(e.g., within the hinge region, or between the C-terminus of CH1 and the N-terminus of the hinge region) of a heavy chain of the full-length antibody; and wherein the anti-CD4 antibody comprises: i) a VH-CDR1 comprising the sequence of SEQ ID NO: 67; ii) a VH-CDR2 comprising the sequence of SEQ ID NO: 68; iii) a VH-CDR3 comprising the sequence of SEQ ID NO: 69; iv) a VL-CDR1 comprising the sequence of SEQ ID NO: 70; v) a VL-CDR2 comprising the sequence of SEQ ID NO: 71; and vi) a VL-CDR3 comprising the sequence of SEQ ID NO: 72. In some embodiments, the anti-CD4 antibody comprises a VH comprising the sequence of SEQ ID NO: 73 and a VL comprising the sequence of SEQ ID NO: 74. In some embodiments, the parental anti-CD4 antibody comprises two heavy chains each comprising the sequence of SEQ ID NO: 75 or 76, and two light chains each comprising the sequence of SEQ ID NO: 77. In some embodiments, the p40 subunit of the IL-23 variant comprises the sequence of SEQ ID NO: 31. In some embodiments, the p40 subunit or variant thereof (e.g., any of SEQ ID NOs: 30-34) is at N-terminus of the p19 subunit or variant thereof (e.g., SEQ ID NO: 37) (e.g., p40-optional linker (e.g., any of SEQ ID NOs: 227-229)-p19). In some embodiments, the p19 subunit or variant thereof is at N-terminus of the p40 subunit or variant thereof (e.g., p19-optional linker (e.g., any of SEQ ID NOs: 227-229)-p40). In some embodiments, the p40 subunit and the p19 subunit of the IL-23 or variant thereof are connected by a linker. In some embodiments, the IL-23 variant comprises the sequence of SEQ ID NO: 39. In some embodiments, the heavy chain comprising the IL-23 variant positioned at the hinge region comprises the sequence of SEQ ID NO: 84. In some embodiments, there is provided an IL-23/anti-CD4 immunocytokine comprising: two light chains comprising the sequence of SEQ ID NO: 77, one heavy chain comprising an IL-23 variant positioned at the hinge region comprising the sequence of SEQ ID NO: 84, and one heavy chain comprises the sequence of SEQ ID NO: 78. In some embodiments, in the presence of binding of the antibody (or antigen-binding fragment) to CD4, the activity (binding affinity to corresponding cytokine receptor or subunit thereof, and/or biological activity) of the IL-23 or variant thereof increases at least about 20% (such as at least about any of 30%, 40%, 50%, 60%, 70%, 80%, 90%, 100%, 200%, 300%, 400%, 500%, or more) compared to that in the absence of binding of the antibody (or antigen-binding fragment) to CD4. In some embodiments, in the absence of binding of the antibody (or antigen-binding fragment) to CD4, the activity (binding affinity to corresponding cytokine receptor or subunit thereof, and/or biological activity) of the IL-23 or variant thereof positioned at the hinge region of the heavy chain is no more than about 70% (such as no more than about any of 60%, 50%, 40%, 30%, 20%, 10%, 9%, 8%, 7%, 6%, 5%, 4%, 3%, 2%, %, 0.9%, 0.8%, 0.7%, 0.6%, 0.5%, 0.4%, 0.3%, 0.2%, 0.1%, or 0%) of that of a corresponding IL-23 or variant thereof in a free state. In some embodiments, the antibody is monospecific. In some embodiments, the antibody is multispecific (e.g., bispecific). In some embodiments, the antibody is homodimeric. In some embodiments, the antibody is heterodimeric. In some embodiments, the antibody is an agonist antibody. In some embodiments, the antibody is an antagonist antibody.

[0198] In some embodiments, the antibody is an anti-CD8 antibody. Thus in some embodiments, there is provided an IL-23 immunocytokine (“IL-23/anti-CD8 immunocytokine”) comprising: a) an antibody (e.g., full-length antibody, heavy chain only antibody, or antigen-binding fragment fused to an Fc domain subunit or portion thereof) specifically recognizing CD8; and b) an IL-23 or variant thereof (e.g., SEQ ID NO: 38 or 39), wherein the antibody comprises a heavy chain comprising a hinge region (e.g., any of SEQ ID NOs: 40-47, 50-52, and 55-59), wherein both p19 subunit (e.g., SEQ ID NO: 37) and p40 subunit (e.g., any of SEQ ID NOs: 30-34) of the IL-23 or variant thereof are positioned in tandem (e.g., connected via an optional peptide linker such as any of SEQ ID NOs: 227-229) at the hinge region (e.g., within the hinge region, or between the C-terminus of CH1 and the N-terminus of the hinge region) of the heavy chain. In some embodiments, there is provided an IL-23/anti-CD8 immunocytokine comprising: a) a full-length antibody specifically recognizing CD8; and b) an IL-23 or variant thereof (e.g., SEQ ID NO: 38 or 39), wherein both p19 subunit (e.g., SEQ ID NO: 37) and p40 subunit (e.g., any of SEQ ID NOs: 30-34) of the IL-23 or variant thereof are positioned in tandem (e.g., connected via an optional peptide linker such as any of SEQ ID NOs: 227-229) at the hinge region (e.g., any of SEQ ID NOs: 40-47, 50-52, and 55-59)(e.g., within the hinge region, or between the C-terminus of CH1 and the N-terminus of the hinge region) of a heavy chain of the full-length antibody; and wherein the anti-CD8 antibody comprises VH-CDR1, VH-CDR2, and VH-CDR3 of a VH comprising the sequence of SEQ ID NO: 114, and VL-CDR1, VL-CDR2, and VL-CDR3 of a VL comprising the sequence of SEQ ID NO: 115. In some embodiments, the anti-CD8 antibody comprises a VH comprising the sequence of SEQ ID NO: 114 and a VL comprising the sequence of SEQ ID NO: 115. In some embodiments, the parental anti-CD8 antibody comprises two heavy chains each comprising the sequence of SEQ ID NO: 116, and two light chains each comprising the sequence of SEQ ID NO: 117. In some embodiments, the p40 subunit or variant thereof (e.g., any of SEQ ID NOs: 30-34) is at N-terminus of the p19 subunit or variant thereof (e.g., SEQ ID NO: 37) (e.g., p40-optional linker (e.g., any of SEQ ID NOs: 227-229)-p19). In some embodiments, the p19 subunit or variant thereof is at N-terminus of the p40 subunit or variant thereof (e.g., p19-optional linker (e.g., any of SEQ ID NOs: 227-229)-p40). In some embodiments, the p40 subunit of the IL-23 variant comprises the sequence of SEQ ID NO: 31. In some embodiments, the p40 subunit and the p19 subunit of the IL-23 or variant thereof are connected by a linker. In some embodiments, the IL-23 variant comprises the sequence of SEQ ID NO: 39. In some embodiments, the heavy chain comprising the IL-23 variant positioned at the hinge region comprises the sequence of SEQ ID NO: 124. In some embodiments, there is provided an IL-23/anti-CD8 immunocytokine comprising: two light chains comprising the sequence of SEQ ID NO: 117, one heavy chain comprising an IL-23 variant positioned at the hinge region comprising the sequence of SEQ ID NO: 124, and one heavy chain comprises the sequence of SEQ ID NO: 118. In some embodiments, in the presence of binding of the antibody (or antigen-binding fragment) to CD8, the activity (binding affinity to corresponding cytokine receptor or subunit thereof, and/or biological activity) of the IL-23 or variant thereof increases at least about 20% (such as at least about any of 30%, 40%, 50%, 60%, 70%, 80%, 90%, 100%, 200%, 300%, 400%, 500%, or more) compared to that in the absence of binding of the antibody (or antigen-binding fragment) to CD8. In some embodiments, in the absence of binding of the antibody (or antigen-binding fragment) to CD8, the activity (binding affinity to corresponding cytokine receptor or subunit thereof, and/or biological activity) of the IL-23 or variant thereof positioned at the hinge region of the heavy chain is no more than about 70% (such as no more than about any of 60%, 50%, 40%, 30%, 20%, 10%, 9%, 8%, 7%, 6%, 5%, 4%, 3%, 2%, %, 0.9%, 0.8%, 0.7%, 0.6%, 0.5%, 0.4%, 0.3%, 0.2%, 0.1%, or 0%) of that of a corresponding IL-23 or variant thereof in a free state. In some embodiments, the antibody is monospecific. In some embodiments, the antibody is multispecific (e.g., bispecific). In some embodiments, the antibody is homodimeric. In some embodiments, the antibody is heterodimeric. In some embodiments, the antibody is an agonist antibody. In some embodiments, the antibody is an antagonist antibody.

[0199] In some embodiments, the antigen-binding protein is an anti-CTLA-4 antibody. Thus in some embodiments, there is provided an IL-23 immunocytokine (“IL-23/anti-CTLA-4 immunocytokine”) comprising: a) an antibody (e.g., full-length antibody, heavy chain only antibody, or antigen-binding fragment fused to an Fc domain subunit or portion thereof) specifically recognizing CTLA-4; and b) an IL-23 or variant thereof (e.g., SEQ ID NO: 38 or 39), wherein the antibody comprises a heavy chain comprising a hinge region (e.g., any of SEQ ID NOs: 40-47, 50-52, and 55-59), and wherein both p19 subunit (e.g., SEQ ID NO: 37) and p40 subunit (e.g., any of SEQ ID NOs: 30-34) of the IL-23 or variant thereof are positioned in tandem (e.g., connected via an optional peptide linker such as any of SEQ ID NOs: 227-229) at the hinge region (e.g., within the hinge region, or between the C-terminus of CH1 and the N-terminus of the hinge region) of the heavy chain. In some embodiments, there is provided an IL-23/anti-CTLA-4 immunocytokine comprising: a) a full-length antibody specifically recognizing CTLA-4; and b) an IL-23 or variant thereof (e.g., SEQ ID NO: 38 or 39), wherein both p19 subunit (e.g., SEQ ID NO: 37) and p40 subunit (e.g., any of SEQ ID NOs: 30-34) of the IL-23 or variant thereof are positioned in tandem (e.g., connected via an optional peptide linker such as any of SEQ ID NOs: 227-229) at the hinge region (e.g., any of SEQ ID NOs: 40-47, 50-52, and 55-59)(e.g., within the hinge region, or between the C-terminus of CH1 and the N-terminus of the hinge region) of a heavy chain of the full-length antibody; and wherein the anti-CTLA-4 antibody comprises VH-CDR1, VH-CDR2, and VH-CDR3 of a VH comprising the sequence of SEQ ID NO: 125, and VL-CDR1, VL-CDR2, and VL-CDR3 of a VL comprising the sequence of SEQ ID NO: 126. In some embodiments, the anti-CTLA-4 antibody comprises a VH comprising the sequence of SEQ ID NO: 125 and a VL comprising the sequence of SEQ ID NO: 126. In some embodiments, the parental anti-CTLA-4 antibody comprises two heavy chains each comprising the sequence of SEQ ID NO: 127 or 128, and two light chains each comprising the sequence of SEQ ID NO: 129. In some embodiments, the p40 subunit or variant thereof (e.g., any of SEQ ID NOs: 30-34) is at N-terminus of the p19 subunit or variant thereof (e.g., SEQ ID NO: 37) (e.g., p40-optional linker (e.g., any of SEQ ID NOs: 227-229)-p19). In some embodiments, the p19 subunit or variant thereof is at N-terminus of the p40 subunit or variant thereof (e.g., p19-optional linker (e.g., any of SEQ ID NOs: 227-229)-p40). In some embodiments, the p40 subunit of the IL-23 variant comprises the sequence of SEQ ID NO: 31. In some embodiments, the p40 subunit and the p19 subunit of the IL-23 or variant thereof are connected by a linker. In some embodiments, the IL-23 variant comprises the sequence of SEQ ID NO: 39. In some embodiments, the heavy chain comprising the IL-23 variant positioned at the hinge region comprises the sequence of SEQ ID NO: 124. In some embodiments, the heavy chain comprising the IL-23 variant positioned at the hinge region comprises the sequence of SEQ ID NO: 136. In some embodiments, there is provided an IL-23/anti-CTLA-4 immunocytokine comprising: two light chains comprising the sequence of SEQ ID NO: 129, one heavy chain comprising an IL-23 variant positioned at the hinge region comprising the sequence of SEQ ID NO: 136, and one heavy chain comprises the sequence of SEQ ID NO: 130. In some embodiments, in the presence of binding of the antibody (or antigen-binding fragment) to CTLA-4, the activity (binding affinity to corresponding cytokine receptor or subunit thereof, and/or biological activity) of the IL-23 cytokine or variant thereof increases at least about 20% (such as at least about any of 30%, 40%, 50%, 60%, 70%, 80%, 90%, 100%, 200%, 300%, 400%, 500%, or more) compared to that in the absence of binding of the antibody (or antigen-binding fragment) to CTLA-4. In some embodiments, in the absence of binding of the antibody (or antigen-binding fragment) to CTLA-4, the activity (binding affinity to corresponding cytokine receptor or subunit thereof, and/or biological activity) of the IL-23 cytokine or variant thereof positioned at the hinge region of the heavy chain is no more than about 70% (such as no more than about any of 60%, 50%, 40%, 30%, 20%, 10%, 9%, 8%, 7%, 6%, 5%, 4%, 3%, 2%, 1%, 0.9%, 0.8%, 0.7%, 0.6%, 0.5%, 0.4%, 0.3%, 0.2%, 0.1%, or 0%) of that of a corresponding IL-23 cytokine or variant thereof in a free state. In some embodiments, the antibody is monospecific. In some embodiments, the antibody is multispecific (e.g., bispecific). In some embodiments, the antibody is homodimeric. In some embodiments, the antibody is heterodimeric. In some embodiments, the antibody is an agonist antibody. In some embodiments, the antibody is an antagonist antibody.

[0200] In some embodiments, the antigen-binding protein is an anti-PD-L1 antibody. Thus in some embodiments, there is provided an IL-23 immunocytokine (“IL-23/anti-PD-L1 immunocytokine”) comprising: a) an antibody (e.g., full-length antibody, heavy chain only antibody, or antigen-binding fragment fused to an Fc domain subunit or portion thereof) specifically recognizing PD-L1; and b) an IL-23 or variant thereof (e.g., SEQ ID NO: 38 or 39), wherein the antibody comprises a heavy chain comprising a hinge region (e.g., any of SEQ ID NOs: 40-47, 50-52, and 55-59), and wherein both p19 subunit (e.g., SEQ ID NO: 37) and p40 subunit (e.g., any of SEQ ID NOs: 30-34) of the IL-23 or variant thereof are positioned in tandem (e.g., connected via an optional peptide linker such as any of SEQ ID NOs: 227-229) at the hinge region (e.g., within the hinge region, or between the C-terminus of CH1 and the N-terminus of the hinge region) of the heavy chain. In some embodiments, there is provided an IL-23/anti-PD-L1 immunocytokine comprising: a) a full-length antibody specifically recognizing PD-L1; and b) an IL-23 or variant thereof (e.g., SEQ ID NO: 38 or 39), wherein both p19 subunit (e.g., SEQ ID NO: 37) and p40 subunit (e.g., any of SEQ ID NOs: 30-34) of the IL-23 or variant thereof are positioned in tandem (e.g., connected via an optional peptide linker such as any of SEQ ID NOs: 227-229) at the hinge region (e.g., any of SEQ ID NOs: 40-47, 50-52, and 55-59)(e.g., within the hinge region, or between the C-terminus of CH1 and the N-terminus of the hinge region) of a heavy chain of the full-length antibody; and wherein the anti-PD-L1 antibody comprises: i) a VH-CDR1 comprising the sequence of SEQ ID NO: 243; ii) a VH-CDR2 comprising the sequence of SEQ ID NO: 244; iii) a VH-CDR3 comprising the sequence of SEQ ID NO: 245; iv) a VL-CDR1 comprising the sequence of SEQ ID NO: 246; v) a VL-CDR2 comprising the sequence of SEQ ID NO: 247; and vi) a VL-CDR3 comprising the sequence of SEQ ID NO: 248. In some embodiments, the anti-PD-L1 antibody comprises a VH comprising the sequence of SEQ ID NO: 137 and a VL comprising the sequence of SEQ ID NO: 138. In some embodiments, the parental anti-PD-L1 antibody comprises two heavy chains each comprising the sequence of SEQ ID NO: 139, and two light chains each comprising the sequence of SEQ ID NO: 140. In some embodiments, the parental anti-PD-L1 antibody comprises two heavy chains each comprising the sequence of SEQ ID NO: 141, and two light chains each comprising the sequence of SEQ ID NO: 142. In some embodiments, the p40 subunit or variant thereof (e.g., any of SEQ ID NOs: 30-34) is at N-terminus of the p19 subunit or variant thereof (e.g., SEQ ID NO: 37) (e.g., p40-optional linker (e.g., any of SEQ ID NOs: 227-229)-p19). In some embodiments, the p19 subunit or variant thereof is at N-terminus of the p40 subunit or variant thereof (e.g., p19-optional linker (e.g., any of SEQ ID NOs: 227-229)-p40). In some embodiments, the p40 subunit of the IL-23 variant comprises the sequence of SEQ ID NO: 31. In some embodiments, the p40 subunit and the p19 subunit of the IL-23 or variant thereof are connected by a linker. In some embodiments, the IL-23 variant comprises the sequence of SEQ ID NO: 39. In some embodiments, the heavy chain comprising the IL-23 variant positioned at the hinge region comprises the sequence of SEQ ID NO: 149. In some embodiments, there is provided an IL-23/anti-PD-L1 immunocytokine comprising: two light chains comprising the sequence of SEQ ID NO: 140, one heavy chain comprising an IL-23 variant positioned at the hinge region comprising the sequence of SEQ ID NO: 149, and one heavy chain comprises the sequence of SEQ ID NO: 143. In some embodiments, in the presence of binding of the antibody (or antigen-binding fragment) to PD-L1, the activity (binding affinity to corresponding cytokine receptor or subunit thereof, and/or biological activity) of the IL-23 cytokine or variant thereof increases at least about 20% (such as at least about any of 30%, 40%, 50%, 60%, 70%, 80%, 90%, 100%, 200%, 300%, 400%, 500%, or more) compared to that in the absence of binding of the antibody (or antigen-binding fragment) to PD-L1. In some embodiments, in the absence of binding of the antibody (or antigen-binding fragment) to PD-L1, the activity (binding affinity to corresponding cytokine receptor or subunit thereof, and/or biological activity) of the IL-23 cytokine or variant thereof positioned at the hinge region of the heavy chain is no more than about 70% (such as no more than about any of 60%, 50%, 40%, 30%, 20%, 10%, 9%, 8%, 7%, 6%, 5%, 4%, 3%, 2%, 1%, 0.9%, 0.8%, 0.7%, 0.6%, 0.5%, 0.4%, 0.3%, 0.2%, 0.1%, or 0%) of that of a corresponding IL-23 cytokine or variant thereof in a free state. In some embodiments, the antibody is monospecific. In some embodiments, the antibody is multispecific (e.g., bispecific). In some embodiments, the antibody is homodimeric. In some embodiments, the antibody is heterodimeric.

[0201] In some embodiments, the antigen-binding protein is an anti-CD25 antibody. Thus in some embodiments, there is provided an IL-23 immunocytokine (“IL-23/anti-CD25 immunocytokine”) comprising: a) an antibody (e.g., full-length antibody, heavy chain only antibody, or antigen-binding fragment fused to an Fc domain subunit or portion thereof) specifically recognizing CD25; and b) an IL-23 or variant thereof (e.g., SEQ ID NO: 38 or 39), wherein the antibody comprises a heavy chain comprising a hinge region (e.g., any of SEQ ID NOs: 40-47, 50-52, and 55-59), and wherein both p19 subunit (e.g., SEQ ID NO: 37) and p40 subunit (e.g., any of SEQ ID NOs: 30-34) of the IL-23 or variant thereof are positioned in tandem (e.g., connected via an optional peptide linker such as any of SEQ ID NOs: 227-229) at the hinge region (e.g., within the hinge region, or between the C-terminus of CH1 and the N-terminus of the hinge region) of the heavy chain, or between the C-terminus of CH1 and the N-terminus of the hinge region) of the heavy chain. In some embodiments, there is provided an IL-23/anti-CD25 immunocytokine comprising: a) a full-length antibody specifically recognizing CD25; and b) an IL-23 or variant thereof (e.g., SEQ ID NO: 38 or 39), wherein both p19 subunit (e.g., SEQ ID NO: 37) and p40 subunit (e.g., any of SEQ ID NOs: 30-34) of the IL-23 or variant thereof are positioned in tandem (e.g., connected via an optional peptide linker such as any of SEQ ID NOs: 227-229) at the hinge region (e.g., any of SEQ ID NOs: 40-47, 50-52, and 55-59)(e.g., within the hinge region, or between the C-terminus of CH1 and the N-terminus of the hinge region) of a heavy chain of the full-length antibody; and wherein the anti-CD25 antibody comprises VH-CDR1, VH-CDR2, and VH-CDR3 of a VH comprising the sequence of SEQ ID NO: 162, and VL-CDR1, VL-CDR2, and VL-CDR3 of a VL comprising the sequence of SEQ ID NO: 163. In some embodiments, the anti-CD25 antibody comprises a VH comprising the sequence of SEQ ID NO: 162 and a VL comprising the sequence of SEQ ID NO: 163. In some embodiments, the parental anti-CD25 antibody comprises two heavy chains each comprising the sequence of SEQ ID NO: 164, and two light chains each comprising the sequence of SEQ ID NO: 165. In some embodiments, the parental anti-CD25 antibody comprises two heavy chains each comprising the sequence of SEQ ID NO: 166, and two light chains each comprising the sequence of SEQ ID NO: 167. In some embodiments, the p40 subunit or variant thereof (e.g., any of SEQ ID NOs: 30-34) is at N-terminus of the p19 subunit or variant thereof (e.g., SEQ ID NO: 37) (e.g., p40-optional linker (e.g., any of SEQ ID NOs: 227-229)-p19). In some embodiments, the p19 subunit or variant thereof is at N-terminus of the p40 subunit or variant thereof (e.g., p19-optional linker (e.g., any of SEQ ID NOs: 227-229)-p40). In some embodiments, the p40 subunit of the IL-23 variant comprises the sequence of SEQ ID NO: 31. In some embodiments, the p40 subunit and the p19 subunit of the IL-23 or variant thereof are connected by a linker. In some embodiments, the IL-23 variant comprises the sequence of SEQ ID NO: 39. In some embodiments, the heavy chain comprising the IL-23 variant positioned at the hinge region comprises the sequence of SEQ ID NO: 174. In some embodiments, there is provided an IL-23/anti-CD25 immunocytokine comprising: two light chains comprising the sequence of SEQ ID NO: 165, one heavy chain comprising an IL-23 variant positioned at the hinge region comprising the sequence of SEQ ID NO: 174, and one heavy chain comprises the sequence of SEQ ID NO: 168. In some embodiments, in the presence of binding of the antibody (or antigen-binding fragment) to CD25, the activity (binding affinity to corresponding cytokine receptor or subunit thereof, and/or biological activity) of the IL-23 cytokine or variant thereof increases at least about 20% (such as at least about any of 30%, 40%, 50%, 60%, 70%, 80%, 90%, 100%, 200%, 300%, 400%, 500%, or more) compared to that in the absence of binding of the antibody (or antigen-binding fragment) to CD25. In some embodiments, in the absence of binding of the antibody (or antigen-binding fragment) to CD25, the activity (binding affinity to corresponding cytokine receptor or subunit thereof, and/or biological activity) of the IL-23 cytokine or variant thereof positioned at the hinge region of the heavy chain is no more than about 70% (such as no more than about any of 60%, 50%, 40%, 30%, 20%, 10%, 9%, 8%, 7%, 6%, 5%, 4%, 3%, 2%, 1%, 0.9%, 0.8%, 0.7%, 0.6%, 0.5%, 0.4%, 0.3%, 0.2%, 0.1%, or 0%) of that of a corresponding IL-23 cytokine or variant thereof in a free state. In some embodiments, the antibody is monospecific. In some embodiments, the antibody is multispecific (e.g., bispecific). In some embodiments, the antibody is homodimeric. In some embodiments, the antibody is heterodimeric. In some embodiments, the antibody is an agonist antibody. In some embodiments, the antibody is an antagonist antibody.

[0202] In some embodiments, the antigen-binding protein is a PD-L2 (e.g., PD-L2 extracellular domain)-hinge-Fc fusion protein. Thus in some embodiments, there is provided an IL-23 immunocytokine (“IL-23/PD-L2-Fc immunocytokine”) comprising: a) a PD-L2-hinge-Fc fusion polypeptide comprising from N′ to C′: a PD-L2 (e.g., SEQ ID NO: 176) specifically recognizing PD-1, a hinge region (e.g., any of SEQ ID NOs: 40-47, 50-52, and 55-59), and an Fc domain subunit or portion thereof; and b) an IL-23 or variant thereof (e.g., SEQ ID NO: 38 or 39), wherein both p19 subunit (e.g., SEQ ID NO: 37) and p40 subunit (e.g., any of SEQ ID NOs: 30-34) of the IL-23 or variant thereof are positioned in tandem (e.g., connected via an optional peptide linker such as any of SEQ ID NOs: 227-229) at the hinge region (e.g., within the hinge region, or between the C-terminus of PD-L2 and the N-terminus of the hinge region) of the PD-L2-hinge-Fc fusion polypeptide. In some embodiments, the parental PD-L2-hinge-Fc fusion protein comprises two PD-L2-hinge-Fc fusion polypeptides each comprising the sequence of SEQ ID NO: 177. In some embodiments, the p40 subunit or variant thereof (e.g., any of SEQ ID NOs: 30-34) is at N-terminus of the p19 subunit or variant thereof (e.g., SEQ ID NO: 37) (e.g., p40-optional linker (e.g., any of SEQ ID NOs: 227-229)-p19). In some embodiments, the p19 subunit or variant thereof is at N-terminus of the p40 subunit or variant thereof (e.g., p19-optional linker (e.g., any of SEQ ID NOs: 227-229)-p40). In some embodiments, the p40 subunit of the IL-23 variant comprises the sequence of SEQ ID NO: 31. In some embodiments, the p40 subunit and the p19 subunit of the IL-23 or variant thereof are connected by a linker. In some embodiments, the IL-23 variant comprises the sequence of SEQ ID NO: 39. In some embodiments, the PD-L2-hinge-Fc fusion polypeptide comprising the IL-23 variant positioned at the hinge region comprises the sequence of SEQ ID NO: 187. In some embodiments, there is provided an IL-23/PD-L2-Fc immunocytokine comprising: a PD-L2-hinge-Fc fusion polypeptide comprising an IL-23 variant positioned at the hinge region comprises the sequence of SEQ ID NO: 187, and a PD-L2-hinge-Fc fusion polypeptide comprises the sequence of SEQ ID NO: 185. In some embodiments, in the presence of binding of the PD-L2 ligand to PD-1, the activity (binding affinity to corresponding cytokine receptor or subunit thereof, and/or biological activity) of the IL-23 cytokine or variant thereof increases at least about 20% (such as at least about any of 30%, 40%, 50%, 60%, 70%, 80%, 90%, 100%, 200%, 300%, 400%, 500%, or more) compared to that in the absence of binding of the PD-L2 ligand to PD-1. In some embodiments, in the absence of binding of the PD-L2 ligand to PD-1, the activity (binding affinity to corresponding cytokine receptor or subunit thereof, and/or biological activity) of the IL-23 cytokine or variant thereof positioned at the hinge region is no more than about 70% (such as no more than about any of 60%, 50%, 40%, 30%, 20%, 10%, 9%, 8%, 7%, 6%, 5%, 4%, 3%, 2%, 1%, 0.9%, 0.8%, 0.7%, 0.6%, 0.5%, 0.4%, 0.3%, 0.2%, 0.1%, or 0%) of that of a corresponding IL-23 cytokine or variant thereof in a free state. In some embodiments, the PD-L2-hinge-Fc fusion protein is monospecific. In some embodiments, the PD-L2-hinge-Fc fusion protein is multispecific (e.g., bispecific). In some embodiments, the PD-L2-hinge-Fc fusion protein is homodimeric. In some embodiments, the PD-L2-hinge-Fc fusion protein is heterodimeric. In some embodiments, the PD-L2 moiety is an agonist that can stimulate or enhance PD-1 signaling. In some embodiments, the PD-L2 moiety is an antagonist that can reduce or block PD-1 signaling.

[0203] In some embodiments, the immunocytokine described herein does not comprise a full-length parental antibody (hereinafter also referred to as “partial antibody immunocytokine” or “partial Fc-fusion immunocytokine”). See, e.g., light grey portions of FIGS. 3A-3C. In some embodiments, the present invention also provides an immunocytokine comprising: (a) a first antigen-binding polypeptide comprising from N-terminus to C-terminus: a first scFv (V_{H}-V_{L}, or VL-V_{H} configuration) specifically recognizing a first target antigen (e.g., CTLA-4, PD-L1, PD-L2, CD25, HER2, PD-1, CD3, CD4, CD123, or CD8), a cytokine or variant thereof (e.g., IL-2, IFN-α (e.g., IFN-α2b), IFN-γ, IL-10, IL-12, or IL-23) at a hinge region or portion thereof (e.g., within the hinge region, or between the C′ of the first scFv and the N′ of the hinge region), and a first subunit of an Fc domain (e.g., IgG1, IgG4, or effectorless IgG1) or portion thereof (e.g., CH2); and (b) a second antigen-binding polypeptide comprising from N-terminus to C-terminus: a second scFv (VH-VL, or VL-VH configuration) specifically recognizing a second target antigen (e.g., CTLA-4, PD-L1, PD-L2, CD25, HER2, PD-1, CD3, CD4, CD123, or CD8), a hinge region or portion thereof (e.g., any of SEQ ID NOs: 40-47, 50-52, and 55-59), and a second subunit of the Fc domain or portion thereof. See, e.g., FIG. 3A. In some embodiments, there is provided an immunocytokine comprising: (a) a first antigen-binding polypeptide comprising from N-terminus to C-terminus: an scFv (VH-VL, or VL-VH configuration) specifically recognizing a first target antigen (e.g., CTLA-4, PD-L1, PD-L2, CD25, HER2, PD-1, CD3, CD4, CD123, or CD8), a cytokine or variant thereof (e.g., IL-2, IFN-α (e.g., IFN-α2b), IFN-γ, IL-10, IL-12, or IL-23) at a hinge region or portion thereof (e.g., within the hinge region, or between the C′ of the scFv and the N′ of the hinge region), and a first subunit of an Fc domain (e.g., IgG1, IgG4, or effectorless IgG1) or portion thereof (e.g., CH2); (b) a second antigen-binding polypeptide comprising from N-terminus to C-terminus: a VH, a CH1, a hinge region or portion thereof (e.g., any of SEQ ID NOs: 40-47, 50-52, and 55-59), and a second subunit of the Fc domain or portion thereof; and (c) a third antigen-binding polypeptide comprising from N-terminus to C-terminus: a VL, and a CL; wherein the VH and CH1 of the second antigen-binding polypeptide and the VL and CL of the third antigen-binding polypeptide form a Fab specifically recognizing a second target antigen (e.g., CTLA-4, PD-L1, PD-L2, CD25, HER2, PD-1, CD3, CD4, CD123, or CD8). See, e.g., FIG. 3B. In some embodiments, there is provided an immunocytokine comprising: (a) a first antigen-binding polypeptide comprising from N-terminus to C-terminus: a VH, a CH1, a cytokine or variant thereof (e.g., IL-2, IFN-α (e.g., IFN-α2b), IFN-γ, IL-10, IL-12, or IL-23) at a hinge region or portion thereof (e.g., any of SEQ ID NOs: 40-47, 50-52, and 55-59), and a first subunit of an Fc domain (e.g., IgG1, IgG4, or effectorless IgG1) or portion thereof (e.g., CH2); (b) a second antigen-binding polypeptide comprising from N-terminus to C-terminus: a VL, and a CL; wherein the VH and CH1 of the first antigen-binding polypeptide and the VL and CL of the second antigen-binding polypeptide form a Fab specifically recognizing a first target antigen (e.g., CTLA-4, PD-L1, PD-L2, CD25, HER2, PD-1, CD3, CD4, CD123, or CD8); and (c) a third antigen-binding polypeptide comprising from N-terminus to C-terminus: an scFv (VH-VL, or VL-VH configuration) specifically recognizing a second target antigen (e.g., CTLA-4, PD-L1, PD-L2, CD25, HER2, PD-1, CD3, CD4, CD123, or CD8), a hinge region or portion thereof, and a second subunit of the Fc domain or portion thereof. See, e.g., FIG. 3C. In some embodiments, there is provided an immunocytokine comprising: (a) a first antigen-binding polypeptide comprising from N-terminus to C-terminus: a VH, a CH1, a cytokine or variant thereof (e.g., IL-2, IFN-α (e.g., IFN-α2b), IFN-γ, IL-10, IL-12, or IL-23) at a hinge region or portion thereof (e.g., any of SEQ ID NOs: 40-47, 50-52, and 55-59), and a portion (e.g., CH2) of a first subunit of an Fc domain (e.g., IgG1, IgG4, or effectorless IgG1); (b) a second antigen-binding polypeptide comprising from N-terminus to C-terminus: a VL, and a CL; (c) a third antigen-binding polypeptide comprising from N-terminus to C-terminus: a VH, a CH1, a hinge region or portion thereof, and a portion (e.g., CH2) of a second subunit of the Fc domain; and (d) a fourth antigen-binding polypeptide comprising from N-terminus to C-terminus: a VL, and a CL; wherein the VH and CH1 of the first antigen-binding polypeptide and the VL and CL of the second antigen-binding polypeptide form a first Fab specifically recognizing a first target antigen (e.g., CTLA-4, PD-L1, PD-L2, CD25, HER2, PD-1, CD3, CD4, CD123, or CD8), and wherein the VH and CH1 of the third antigen-binding polypeptide and the VL and CL of the fourth antigen-binding polypeptide form a second Fab specifically recognizing a second target antigen (e.g., CTLA-4, PD-L1, PD-L2, CD25, HER2, PD-1, CD3, CD4, CD123, or CD8). Other immunocytokine formats wherein the cytokine or variant thereof is positioned at a hinge region (e.g., within the hinge region, between the C-terminus of the antigen-binding fragment and the N-terminus of the hinge region, or between the C-terminus of the hinge region and the N-terminus of the Fc domain subunit) between an antigen-binding fragment (e.g., a ligand such as PD-L2 extracellular domain, a receptor, an antibody fragment such as VHH) and an Fc domain subunit or portion thereof are also contemplated herein. Any of the cytokine moiety and hinge configuration described for “full-length antibody immunocytokines” can be applied to any of the “partial antibody immunocytokines” or “partial Fc-fusion immunocytokines” described herein. In some embodiments, in the presence of binding of the antigen-binding protein or antigen binding fragment (e.g., ligand, receptor, VHH, scFv, or Fab) of the immunocytokine to the target antigen, the activity (binding affinity to corresponding cytokine receptor or subunit thereof, and/or biological activity) of the cytokine or variant thereof increases at least about 20% (such as at least about any of 30%, 40%, 50%, 60%, 70%, 80%, 90%, 100%, 200%, 300%, 400%, 500%, or more) compared to that in the absence of binding of the antigen-binding protein or antigen binding fragment to the target antigen. In some embodiments, in the absence of binding of the antigen-binding protein or antigen-binding fragment (e.g., ligand, receptor, VHH, scFv, or Fab) of the immunocytokine to the target antigen, the activity (binding affinity to corresponding cytokine receptor or subunit thereof, and/or biological activity) of the cytokine or variant thereof positioned at the hinge region between the antigen-binding fragment (e.g., ligand, receptor, VHH, scFv, or Fab) and an Fc domain subunit (or portion thereof)) is no more than about 70% (such as no more than about any of 60%, 50%, 40%, 30%, 20%, 10%, 9%, 8%, 7%, 6%, 5%, 4%, 3%, 2%, %, 0.9%, 0.8%, 0.7%, 0.6%, 0.5%, 0.4%, 0.3%, 0.2%, 0.1%, or 0%) of that of a corresponding cytokine or variant thereof in a free state. In some embodiments, the cytokine or variant thereof is a cytokine variant. In some embodiments, the activity (binding affinity to corresponding cytokine receptor or subunit thereof, and/or biological activity) of the cytokine variant in a free state is no more than about 80% (such as no more than about any of 70%, 60%, 50%, 40%, 30%, 20%, 10%, or 5%) of that of a corresponding wildtype cytokine in a free state. In some embodiments, only one antigen-binding polypeptide comprising the Fc domain subunit or portion thereof comprises the cytokine or variant thereof positioned at the hinge region.

[0204] In some embodiments, each antigen-binding polypeptide comprising the Fc domain subunit or portion thereof comprises a cytokine or variant thereof positioned at the hinge region. In some embodiments, the immunocytokine comprises two or more (e.g., 2, 3, 4, 5, or more) cytokines or variants thereof, wherein the two or more cytokines or variant thereof are positioned in tandem (e.g., connected via an optional peptide linker) at the hinge region of one antigen-binding polypeptide. In some embodiments, the cytokine or variant thereof is a monomeric cytokine or variant thereof, such as IL-2 or IFN-α (e.g., IFN-α2a, IFN-α2b, IFN-α2c). In some embodiments, the cytokine or variant thereof is a dimeric cytokine or variant thereof. In some embodiments, the cytokine or variant thereof is a homodimeric cytokine or variant thereof, such as IL-10 or IFN-γ.

[0205] In some embodiments, the cytokine or variant thereof is a heterodimeric cytokine or variant thereof, such as IL-12 or IL-23. In some embodiments, both subunits of the dimeric cytokine or variant thereof are positioned in tandem (e.g., connected via an optional peptide linker) at the hinge region of one antigen-binding polypeptide. In some embodiments, one subunit of the dimeric cytokine or variant thereof is positioned at the hinge region of one antigen-binding polypeptide, and the other subunit of the dimeric cytokine or variant thereof is positioned at the hinge region of the other antigen-binding polypeptide. In some embodiments, the two or more cytokines or variants thereof are the same. In some embodiments, the two or more cytokines or variants thereof are different. In some embodiments, the immunocytokine is monospecific with regard to target antigen binding. In some embodiments, the immunocytokine is multispecific (e.g., bispecific) with regard to target antigen binding. In some embodiments, the cytokine or variant thereof is selected from the group consisting of IL-1, IL-2, IL-3, IL-4, IL-5, IL-6, IL-7, IL-8, IL-9, IL-10, IL-12, IL-15, IL-17, IL-18, IL-21, IL-22, IL-23, IL-27, IL-35, IFN-α, IFN-β, IFN-γ, TNF-α, TGF-β, erythropoietin, thrombopoietin, VEGF, G-CSF, M-CSF, SCF, and GM-CSF. In some embodiments, the cytokine or variant thereof is positioned between the C-terminus of CH1, scFv, or ligand/receptor and the N-terminus of the hinge region. In some embodiments, the cytokine or variant thereof is positioned between the C-terminus of the hinge region and the N-terminus of the Fc domain subunit or portion thereof. In some embodiments, the cytokine or variant thereof is positioned within the hinge region (e.g., replaces an internal portion of the hinge region, or inserted within the hinge region without deleting hinge region amino acid, or inserted within the hinge region and introducing one or more amino acids). In some embodiments, the Fc domain or portion thereof comprises knobs-into-holes (KIH) mutations. In some embodiments, the parental antigen-binding protein (e.g., antibody, antigen-binding fragment, or ligand/receptor-hinge-Fc fusion protein) is homodimeric. In some embodiments, the parental antigen-binding protein is heterodimeric. In some embodiments, the parental antigen-binding protein (e.g., antibody, or ligand-hinge-Fc fusion protein such as PD-L2-hinge-Fc fusion protein) is an agonist. In some embodiments, the parental antigen-binding protein is an antagonist.

### Cytokines or Variants Thereof

[0206] Cytokines (also referred to as “cytokine molecule” or “cytokine protein” interchangeably) are secreted proteins that modulate the activity of cells of the immune system. Examples of cytokines include the interleukins, interferons, chemokines, lymphokines, tumor necrosis factors, colony-stimulating factors for immune cell precursors, and so on. In some embodiments, the cytokine is a wildtype cytokine. In some embodiments, the cytokine is a naturally existing cytokine species variant. In some embodiments, the cytokine is a naturally existing cytokine subtype. A “cytokine variant” herein refers to any cytokine molecule that is not naturally existing, such as a cytokine active fragment (e.g., a cytokine fragment that retains at least about 10% biological activity or cytokine receptor binding activity of a full-length cytokine), a mutant, or a derivative thereof. A “cytokine or variant thereof” is also interchangeably referred to herein as a “cytokine moiety,” which can be a cytokine molecule, or a species variant, subtype, active fragment, mutant, or derivative thereof.

[0207] As used herein, “heterodimeric cytokine” or “cytokine heterodimer” refers to a cytokine consisting of two distinct protein subunits. At present, IL-12 family (includes IL-12, IL-23, IL-27, and IL-35) is the only naturally occurring heterodimeric cytokine family that is known. However, artificial heterodimeric cytokines can be constructed. For example, IL-6 and a soluble fragment of IL-6R can be combined to form a heterodimeric cytokine, as can CNTF and CNTF-R alpha (Trinchieri (1994) Blood 84:4008). “Homodimeric cytokine” or “cytokine homodimer” herein refers to a cytokine consisting of two identical protein subunits, such as IFN-γ or IL-10. “Monomeric cytokine” or “cytokine monomer” refers to a cytokine that consists of one unit of cytokine molecule. In some embodiments, the cytokine or variant thereof is a monomeric cytokine or variant thereof. In some embodiments, the cytokine or variant thereof is a homodimeric cytokine or variant thereof. In some embodiments, the cytokine or variant thereof is a heterodimeric cytokine or variant thereof.

[0208] In some embodiments, the cytokine moiety is a full-length cytokine molecule. In some embodiments, the cytokine moiety is a functional fragment of the cytokine molecule that is capable of producing some (e.g., at least about 10%, 20%, 30%, 40%, 50%, 60%, 70%, 80%, 90%, or 95%) or full biological activity and/or cytokine receptor binding activity of a full-length cytokine molecule. In some embodiments, the cytokine moiety is a precursor cytokine molecule. In some embodiments, the cytokine moiety is a mature cytokine molecule (e.g., no signal peptide). In some embodiments, the cytokine moiety is a wild-type cytokine. In some embodiments, the cytokine moiety is a naturally existing cytokine species variant. In some embodiments, the cytokine moiety is a naturally existing cytokine subtype. In some embodiments, the cytokine moiety is a cytokine variant, such as a mutant cytokine capable of producing some (e.g., at least about 10%, 20%, 30%, 40%, 50%, 60%, 70%, 80%, 90%, or 95%) or full biological activity and/or cytokine receptor binding activity of a wild-type cytokine. In some embodiments, the cytokine variant is a modified cytokine, such as glycosylated cytokine. The cytokine or variant thereof described herein can be a cytokine isolated from a variety of sources, such as from human tissue types or from another source, or prepared by recombinant or synthetic methods. In some embodiments, the cytokine moiety is a recombinant cytokine. In some embodiments, the cytokine moiety described herein can be a cytokine derived from any organism, such as mammals, including, but are not limited to, livestock animals (e.g., cows, sheep, goats, cats, dogs, donkeys, and horses), primates (e.g., human and non-human primates such as monkeys or chimpanzees), rabbits, and rodents (e.g., mice, rats, gerbils, and hamsters). In some embodiments, the cytokine moiety is a human cytokine, such as recombinant human cytokine. In some embodiments, the cytokine moiety is a murine cytokine, such as recombinant murine cytokine. In some embodiments, the cytokine moiety is a mature human cytokine. In some embodiments, the cytokine moiety comprises a signal peptide at the N-terminus of the cytokine molecule, the signal peptide is either from a different molecule or from the same cytokine molecule.

[0209] Cytokine variants can be of truncated versions, post-translationally modified versions, hybrid variants, peptide mimetics, biologically active fragments, deletion variants, substitution variants, or addition variants that maintain at least some degree (e.g., at least about 10%) of the parental cytokine activity (cytokine receptor binding activity and/or biological activity). “Parental cytokine” or “parent cytokine” described herein refers to the cytokine reference sequence from which the cytokine variant is engineered, modified, or derived from.

[0210] When immunocytokine of the subject invention is described to contain two or more different cytokines (and optionally including additional protein moieties), it means that the immunocytokine contains two or more different cytokine molecules (rather than two or more different cytokine subunits). For example, a homodimeric cytokine (e.g. IFN-α, IFN-β, IFN-γ, IL-5, IL-8, or the like) is referred to herein a single cytokine molecule. For example, an immunocytokine comprising two IL-5 monomers/subunits (either on the same polypeptide chain as a single-chain fusion or on different polypeptide chains), is considered to contain only one cytokine molecule, i.e., IL-5. Similarly, a heterodimeric cytokine such as IL-12, although it contains different subunits, is a single cytokine. For example, an immunocytokine comprising a p35 subunit and a p40 subunit (either on the same polypeptide chain as a single-chain fusion or on different polypeptide chains), is considered to contain only one cytokine molecule, i.e., IL-12. Furthermore, a heterodimeric form of normally homodimeric cytokines, such as a MCP-1/MCP-2 heterodimer, or of two alleles of a normally homodimeric cytokine (e.g., Zhang, J. Biol. Chem. [1994] 269:15918-24) is a single cytokine. In some embodiments, the cytokine subunit (e.g., p35 of IL-12) on one polypeptide chain of an immunocytokine can dimerize with the pairing cytokine subunit (e.g., p40) either on the same polypeptide chain or on a different polypeptide chain within the same immunocytokine. In some embodiments, the cytokine subunit (e.g., p35 of IL-12) of an immunocytokine can dimerize with the pairing cytokine subunit (e.g., p40) of a nearby immunocytokine.

[0211] In some embodiments, the cytokine variant comprises a mutation or modification (e.g., post-translational modification) that results in selectivity against a first type of receptor (e.g., trimeric receptor, or higher affinity receptor) versus a second type of receptor of the corresponding cytokine molecule (e.g., dimeric receptor, or weaker affinity receptor), measured as a ratio of activation of cells expressing the first type of receptor relative to activation of cells expressing the second type of receptor. For example, in some embodiments, the cytokine variant is a mutant IL-2 (or post-translationally modified IL-2), which binds IL-2Rβγ with stronger affinity (e.g., at least about any of 2, 3, 4, 5, 6, 7, 8, 9, or 10-fold stronger affinity) compared to IL-2Rαβγ, or activates cells expressing IL-2Rβγ more than (e.g., at least about any of 2, 3, 4, 5, 6, 7, 8, 9, or 10-fold activation) those expressing IL-2Rαβγ; or vice versa. In some embodiments, depending on the disease types to be treated, the preferred mutations or alterations increase cytokine moiety's activation of immune effector cells (e.g., CD8+ T cells for treating cancer). For example, in some embodiments, the IL-2 variant has a mutation (or post-translationally modification) that reduces the IL-2 variant's activation of cells expressing IL-2Rβγ receptor relative to the IL-2 variant's activation of cells expressing IL-2Rαβγreceptor.

[0212] In some embodiments, the mutation or modification of the cytokine variant leads to a differential effect (e.g., such as reduced binding or cell activation), compared to an immunocytokine without mutation or modification to such cytokine moiety. In one aspect, the differential effect is measured by the proliferative response of cells or cell lines that depend on the cytokine (e.g., IL-2) for growth. This response to the immunocytokine is expressed as an EC50 value, which is obtained from plotting a dose response curve and determining the protein concentration that results in a half-maximal response. In some embodiments, the ratio of the EC50 values obtained for cells expressing the first receptor type (e.g., IL-2Rβγ receptor) to cells expressing the second receptor type (e.g., IL-2Rαβγreceptor) for an immunocytokine of the invention (e.g., IL-2 variant immunocytokine) relative to the ratio of EC50 values for a reference immunocytokine (e.g., IL-2 wildtype immunocytokine of the same configuration) gives a measure of the differential effect for the immunocytokine. In some embodiments, the EC50 value obtained for an immunocytokine of the invention (e.g., IL-2 variant immunocytokine) relative to the EC50 value for a reference immunocytokine (e.g., IL-2 wildtype immunocytokine of the same configuration) gives a measure of the differential effect for the immunocytokine.

[0213] In some embodiments, the cytokine variant includes a mutation in one or more amino acids of the parental cytokine molecule (e.g., mature wildtype cytokine). In one embodiment, the cytokine variant includes an amino acid substitution at one or more amino acid positions in the cytokine. In another embodiment, the cytokine variant includes deletions or insertions of amino acids at one or more amino acid positions in the cytokine. In some embodiments, the cytokine variant includes modifications of one or more amino acids in the cytokine.

[0214] In some embodiments, the cytokine or variant thereof is selected from the group consisting of IL-1, IL-2, IL-3, IL-4, IL-5, IL-6, IL-7, IL-8, IL-9, IL-10, IL-12, IL-15, IL-17, IL-18, IL-21, IL-22, IL-23, IL-27, IL-35, IFN-α, IFN-β, IFN-γ, TNF-α, TGF-β, VEGF, erythropoietin, thrombopoietin, G-CSF, M-CSF, SCF, and GM-CSF, or natural variants or subtypes thereof. In some embodiments, the cytokine or variant thereof is an anti-inflammatory or immunosuppressive cytokine or variant thereof, such as IL-10, IL-27, IL-35, TGF-β, and VEGF. In some embodiments, the cytokine or variant thereof is a pro-inflammatory or immunostimulating cytokine or variant thereof, such as IL-1, IL-2, IL-3, IL-4, IL-5, IL-6, IL-7, IL-8, IL-9, IL-12, IL-15, IL-17, IL-18, IL-21, IL-22, IL-23, IL-27, IFN-α, IFN-β, IFN-γ, TNF-α, erythropoietin, thrombopoietin, G-CSF, M-CSF, SCF, and GM-CSF. In some embodiments, the cytokine or variant thereof is selected from the group consisting of IL-2, IL-10, IL-12, IL-23, IFN-α (e.g., IFN-α2 or IFN-α2b), and IFN-γ. In some embodiments, the cytokine is IL-12, and the cytokine subunits are p35 and p40. In some embodiments, the cytokine is IL-23, and the cytokine subunits are p40 and p19. In some embodiments, the cytokine is IL-27, and the cytokine subunits are Epstein-Barr virus-induced gene 3 (EBI3) and IL-27p28. In some embodiments, the cytokine is IL-35, and the cytokine subunits are IL-12a (p35) and IL-270. In some embodiments, the cytokine variant is a single chain fusion of two or more subunits from different cytokines.

[0215] IL-2

[0216] In some embodiments, the cytokine or variant thereof is IL-2 or variant thereof. Interleukin-2 (IL-2), also known as T cell growth factor (TCGF), is a 15.5 kDa monomeric protein that plays a key role in lymphocyte generation, survival, and homeostasis. It is involved in body's natural response to microbial infection and discriminating between “self” and “non-self.” IL-2 is an interleukin, it belongs to a cytokine family that includes IL-4, IL-7, IL-9, IL-15, and IL-21. IL-2 mediates its effects by binding to IL-2 receptors (IL-2R) expressed on lymphocytes. Activated CD4⁺ T cells and activated CD8⁺ T cells are the major sources of IL-2. Its ability to expand lymphocyte populations and increase effector functions of these cells makes IL-2 an attractive therapy against cancer. IL-2 has been suggested for treating acute myeloid leukemia (AML), non-Hodgkin's lymphoma (NHL), cutaneous T-cell lymphoma (CTCL), breast cancer, and bladder cancer.

[0217] IL-2 receptor (IL-2R) is a complex consisting of three chains, a (CD25, p55), 13(CD122, p75), and γ (CD132, p65). The γ chain is shared by all IL-2 cytokine family members. IL-2 binding to either intermediate-affinity dimeric CD122/CD132 IL-2R (IL-2Rβγ, Kd˜10⁻⁹ M) or high-affinity trimeric CD25/CD122/CD132 IL-2R (IL-2Rαβγ, K_{d}˜10⁻⁴ M) can lead to signal transduction, while binding to CD25 alone cannot. The 1 chain is complexed with Janus kinase 1 (JAK1). The γ chain is complexed with JAK3. Upon IL-2 binding to IL-2R, JAK1 and JAK3 are activated and capable of adding phosphate groups to molecules, thus initiating three intracellular signaling pathways: the MAP kinase pathway, the Phosphoinositide 3-kinase (PI3K) pathway, and the JAK-STAT pathway. Dimeric IL-2Rβγ is expressed by memory CD8⁺ T cells, NK cells, and B cells, whereas high levels of trimeric IL-2Rαβγ is expressed by regulatory T cells (Tregs) and activated T cells.

[0218] Aldesleukin (Proleukin®), recombinant human IL-2, was the first cancer immunotherapy, and one of the first recombinant proteins, approved by the FDA in 1992. Currently, Aldesleukin is used for the treatment of metastatic renal cell carcinoma (mRCC) and metastatic melanoma (mM) by IV infusion. Due to the requirement of frequent intravenous infusion over multiple doses, administration of Aldesleukin occurs within a clinical setting. Aldesleukin has demonstrated complete cancer regression in about 10% of patients treated for metastatic melanoma and renal cancer (Klapper et al., Cancer, 2008; Rosenberg, Sci TranslMed., 2012; Smith et al., Clin Cancer Res., 2008). Approximately 70% of patients with complete responses have been cured, maintaining complete regression for more than 25 years after initial treatment (Atkins et al., J Clin Oncol., 1999; Klapper et al., Cancer, 2008; Rosenberg, Sci Transl Med., 2012; Rosenberg et al., Ann Surg., 1998; Smith et al., Clin Cancer Res., 2008). However, high doses of IL-2 can induce vascular leak syndrome (VLS), tumor tolerance caused by activation-induced cell death (AICD), and immunosuppression caused by the activation of Tregs. An additional concern of systemic IL-2 treatment is related to severe side effects upon intravenous administration, which include severe cardiovascular, pulmonary edema, hepatic, gastrointestinal (GI), neurological, and hematological events (Proleukin (aldesleukin) Summary of Product Characteristics [SmPC]: http://www.medicines.org.uk/emc/medicine/19322/SPC). The severe side effects often restrict optimal IL-2 dosing, which limits the number of patients who successfully respond to therapy. For more prevalent application in the future, toxicity and short half-life concerns of IL-2 need to be addressed.

[0219] Native human IL-2 precursor polypeptide consists of 153 amino acid residues (amino acids 1-20 are signal peptide), while the mature polypeptide consists of 133 amino acid residues (SEQ ID NO: 1). In some embodiments, the IL-2 moiety is a human mature IL-2. In some embodiments, the IL-2 moiety is a polypeptide substantially homologous to amino acid sequence of SEQ ID NO: 1, e.g., having at least about 85% (such as at least about any of 90%, 91%, 92%, 93%, 94%, 95%, 96%, 97%, 98%, 99%, or 100%) amino acid sequence identity to SEQ ID NO: 1. In some embodiments, the IL-2 moiety is not glycosylated. In some embodiments, the IL-2 moiety is glycosylated.

[0220] In some embodiments, the IL-2 moiety is (or consists essentially of) Aldesleukin (e.g., Proleukin®; see, e.g., https://www.drugbank.ca/drugs/DB00041). Aldesleukin (desalanyl-1, serine-125 human interleukin-2) is an antineoplastic (anticancer) biologic response modifier approved by the FDA. It has a molecular weight of approximately 15.3 kDa, and synonym recombinant interleukin-2 human, Interleukin-2 aldesleukin, 125-L-serine-2-133-interleukin 2 (human reduced), or Interleukin-2(2-133), 125-ser. Aldesleukin is a recombinant IL-2, it differs from native IL-2 in the following ways: a) Aldesleukin is not glycosylated because it is produced from E. coli; b) Aldesleukin has no N-terminal alanine (A); c) Aldesleukin has a cysteine to serine substitution at position 125 (C125S); and d) the aggregation state of Aldesleukin is likely different from that of native IL-2. Thus in some embodiments, the IL-2 variant comprises a cysteine to serine substitution at position 125 (C125S) from the human IL-2 mature form.

[0221] K. Sauvé et al. (Proc Natl Acad Sci USA. 1991; 88(11):4636-4640) found that amino acid residues K35, R38, F42, and K43 of wildtype IL-2 were found to be crucial for IL-2 receptor binding (IL-2Rα, low affinity form), and R38A and F24A mutations retained substantial IL-2 biological activity. R. Vazquez-Lombardi et al. (Nat Commun. 2017; 8:15373) discovered that R38D, K43E, and E61R mutations in IL-2 drove strong expansion of CD25⁻ cytotoxic subsets with minimal expansion of Tregs compared to wildtype IL-2. P65L mutation in IL-2 was found to have reduced systemic toxicity and greater antitumor efficacy compared to wildtype IL-2 (Chen et al., Cell Death Dis. 2018; 9(10):989).

[0222] In some embodiments, the IL-2 variant comprises one or more mutations at a position selected from the group consisting of F24, K35, R38, F42, K43, E61, and P65 relative to a wildtype IL-2 comprising the sequence of SEQ ID NO: 1. In some embodiments, the IL-2 variant comprises one or more mutations selected from the group consisting of F24A, R38D, K43E, E61R, and P65L relative to a wildtype IL-2 comprising the sequence of SEQ ID NO: 1. In some embodiments, the IL-2 variant comprises an R38D/K43E/E61R mutation relative to a wildtype IL-2 comprising the sequence of SEQ ID NO: 1. In some embodiments, the IL-2 variant comprises the sequence of SEQ ID NO: 2.

[0223] IFN-α

[0224] In some embodiments, the cytokine or variant thereof is IFN-α or variant thereof, such as IFN-α2 or variant thereof, or IFN-α2b or variant thereof. Human type I interferons (IFNs) are a large group of IFNs that help regulate the activity of the immune system. They bind to a specific cell surface receptor complex known as the IFN-α receptor (IFNAR) consisting of IFNAR1 and IFNAR2 chains. Mammalian type I IFNs contain IFN-α, IFN-β, IFN-κ, IFN-δ, IFN-ε, IFN-τ, IFN-ω, and IFN-ξ (a.k.a. limitin).

[0225] IFN-α proteins are mainly produced by plasmacytoid dendritic cells (pDCs), and mainly involved in innate immunity against viral infection. IFN-α proteins are 19-26 kDa monomeric proteins that have been extensively used for the treatment of cancer and viral diseases, such as Hepatitis B and C. There are 13 genes responsible for synthesis of 13 IFN-α subtypes: IFNA1, IFNA2, IFNA4, IFNA5, IFNA6, IFNA7, IFNA8, IFNA10, IFNA13, IFNA14, IFNA16, IFNA17, IFNA21.

[0226] Human IFN-α2a, IFN-α2b, and IFN-α2c represent allelic variants of the same gene. IFN-α2a and IFN-α2b have a lysine and an arginine at position 23 of the mature protein, respectively. Human IFN-α2a and IFN-α2b are the only IFN-α subtypes with an O-glycosylation site (on Thr106). Interferon alfa-2a (IFN-α2a; marketed by Hoffmann-La Roche as Roferon-A®) and interferon alfa-2b (IFN-α2b, recombinant form of IFN-α2; marketed by Schering-Plough as Intron-A®) have been approved for the treatment of hairy cell leukemia, melanoma, follicular lymphoma, renal cell carcinoma, AIDS-related Kaposi's sarcoma, and chronic myelogenous leukemia (M. Ferrantini et al., Biochimie. June-July 2007; 89(6-7):884-893). Recent studies have underscored new immunomodulatory effects of IFN-α, including activities on T cells and dendritic cells, which may lead to generation of a durable antitumor response. However, the use of IFN-α in clinical oncology is still generally based on exploiting the anti-proliferative and anti-angiogenic activities of these cytokines. Full exploit of the role of IFN-α as a regulator of immune response and tumor immunity would require novel approaches in the use of these cytokines. [0206] hIFN-α2b is a glycoprotein consisting of 166 amino acids with O-glycosylated threonine at position 106. Each rhIFN-2b consists of five a helices (called helix A to E) connected by a loop AB, BC, CD, and DE. Residues that are important in receptor binding are the AB loop (Arg22, Leu26, Phe27, Leu30, Lys31, Arg33, and His34), helix B (Ser68), helix C (Thr79, Lys83, Tyr85, and Tyr89), D helix (Arg120, lys121, Gln124, Lys131, and Glu132), and helix E (Arg144 and Glu146). Amino acid residues that are important in the biological activity are Leu30, Lys31, Arg33, His34, Phe36, Arg120, Lys121, Gln124, Tyrl22, Tyrl29, Lys131, Glu132, Arg144, and Glu146 (Ratih Asmana Ningrum, Scientifica (Cairo). 2014; 2014:970315).

[0227] In some embodiments, the IFN-α moiety is IFN-α2. In some embodiments, the IFN-α moiety is IFN-α2a. In some embodiments, the IFN-α moiety is IFN-α2b. In some embodiments, the IFN-α moiety is IFN-α2c. In some embodiments, the IFN-α moiety is a mature IFN-α. Native human IFN-α2b precursor polypeptide consists of 188 amino acid residues (amino acids 1-23 are signal peptide), while the mature polypeptide consists of 165 amino acid residues (SEQ ID NO: 3). In some embodiments, the IFN-α moiety is a polypeptide substantially homologous to amino acid sequence of SEQ ID NO: 3, e.g., having at least about 85% (such as at least about any of 90%, 91%, 92%, 93%, 94%, 95%, 96%, 97%, 98%, 99%, or 100%) amino acid sequence identity to SEQ ID NO: 3. In some embodiments, the IFN-α moiety is not glycosylated. In some embodiments, the IFN-α moiety is glycosylated.

[0228] In some embodiments, the IFN-α variant (e.g., IFN-α2b variant) comprises one or more mutations at a position selected from the group consisting of R22, L26, F27, L30, K31, D32, R33, H34, D35, F36, S68, T79, K83, Y85, Y89, R120, K121, Y122, Q124, Y129, K131, E132, R144, and E146 relative to an IFN-α (e.g., IFN-α2b) comprising the sequence of SEQ ID NO: 3. In some embodiments, the IFN-α variant (e.g., IFN-α2b variant) comprises one or more mutations selected from the group consisting of L30A, K31A, D32A, R33A, H34A, and D35A relative to an IFN-α comprising the sequence of SEQ ID NO: 3. In some embodiments, the IFN-α variant (e.g., IFN-α2b variant) comprises the sequence of any of SEQ ID NOs: 4-9. In some embodiments, the IFN-α variant (e.g., IFN-α2b variant) comprises an L30A mutation relative to an IFN-α comprising the sequence of SEQ ID NO: 3. In some embodiments, the IFN-α variant (e.g., IFN-α2b variant) comprises the sequence of SEQ ID NO: 4.

[0229] IFN-γ

[0230] In some embodiments, the cytokine or variant thereof is IFN-γ or variant thereof. Interferon gamma (IFNγ) is a disulfide-linked dimerized soluble cytokine that is the only member of the type II class of interferons. IFN-γ is a homodimer of −25 kDa with a tertiary fold built around an unusual pattern of interdigitating a helices. It is produced predominantly by T cells and NK cells in response to a variety of inflammatory or immune stimuli. IFN-γ can serve both as an immune system activator and suppressor. Studies showed that cancer immunotherapy (checkpoint inhibitors) acts partially through an increase of IFN-γ expression, leading to the elimination of cancer cells. Resistance to immunotherapy is attributed to defects in IFN-γ signaling. However, IFN-γ can also contribute to cancer evasion by promoting tumorigenesis and angiogenesis, eliciting expression of tolerant molecules such as PD-L1, and inducing homeostasis program. Due to its opposite and competing effects on the immune system, IFN-γ has not been approved by FDA to treat cancer patients except in the case of malignant osteoporosis (L. Ni and J. Lu, CancerMed. 2018; 7(9):4509-4516).

[0231] Monomeric native human IFN-γ (hIFN-γ) pre-pro-polypeptide consists of 166 amino acid residues (amino acids 1-23 are signal peptide); the monomeric mature polypeptide consists of 138 amino acid residues (SEQ ID NO: 10), corresponding to amino acids 24-161 of the pre-pro-polypeptide; amino acids 162-166 are propeptide sequence of the pre-pro-polypeptide. In some embodiments, the monomeric IFN-γ moiety is a monomeric mature IFN-γ. In some embodiments, the monomeric IFN-γ moiety is a polypeptide substantially homologous to amino acid sequence of SEQ ID NO: 10, e.g., having at least about 85% (such as at least about any of 90%, 91%, 92%, 93%, 94%, 95%, 96%, 97%, 98%, 99%, or 100%) amino acid sequence identity to SEQ ID NO: 10. In some embodiments, the IFN-γ moiety (or subunit) is not glycosylated. In some embodiments, the IFN-γ moiety (or subunit) is glycosylated. In some embodiments, the IFN-γ moiety comprises two identical IFN-γ monomers/subunits. In some embodiments, the IFN-γ moiety comprises two different IFN-γ monomers/subunits. For example, in some embodiments, the IFN-γ moiety comprises one wildtype IFN-γ monomer and one IFN-γ variant monomer. In some embodiments, the IFN-γ moiety comprises two IFN-γ monomers (e.g., two IFN-γ variant or wildtype monomers) linked together, such as via a peptide linker (e.g., any of SEQ ID NOs: 227-229) or a chemical linker.

[0232] IFN-γ amino acid residues S20, A23, H111, and Q115 are important for receptor binding; amino acid residues V5, S20, A23, G26, and H111 are important for IFN-γ biological activity (M. Randal and A. A. Kossiakoff, Structure. 2001; 9(2):155-63). Lander et al. (J Mol Biol. 2000; 299(1):169-79) developed a biologically active single chain variant of IFN-γ (IFN-γSC1), by linking two monomeric IFN-γ with a 7-amino acid residue linker and changing His 111 in the first IFN-γ monomer to an aspartic acid residue. Due to the H111D mutation, IFN-γSC1 can only bind one IFN-γRα but can fully retain its biological activity in cell proliferation, MHC class I induction, and anti-viral assays.

[0233] In some embodiments, the monomeric IFN-γ comprises the sequence of SEQ ID NO: 10. In some embodiments, the IFN-γ variant comprises one or more mutations within one or both IFN-γ subunits at a position selected from the group consisting of V5, S20, D21, V22, A23, D24, N25, G26, H111, and Q115 relative to a wildtype IFN-γ subunit comprising the sequence of SEQ ID NO: 10. In some embodiments, the IFN-γ variant comprises one or more mutations within one or both IFN-γ subunits selected from the group consisting of S20A, D21A, D21K, V22A, A23S, A23E, A23Q, A23V, D24A, D24E, N25A, N25K, and HI ID relative to a wildtype IFN-γ subunit comprising the sequence of SEQ ID NO: 10. In some embodiments, the IFN-γ variant comprises one or more mutations within one or both IFN-γ subunits selected from the group consisting of S20A/D21A, D21K, V22A/A23S, D24A/N25A, A23E/D24E/N25K, A23Q, and A23V relative to a wildtype IFN-γ subunit comprising the sequence of SEQ ID NO: 10. In some embodiments, one or both subunits of the IFN-γ variant comprises the sequence of any of SEQ ID NOs: 11-17. In some embodiments, the IFN-γ variant comprises an A23V mutation within one or both IFN-γ subunits relative to a wildtype IFN-γ subunit comprising the sequence of SEQ ID NO: 10. In some embodiments, the one or both subunits of the IFN-γ variant comprises the sequence of SEQ ID NO: 13. In some embodiments, the two subunits of the IFN-γ or variant thereof are connected by a linker (e.g., any of SEQ ID NOs: 227-229). In some embodiments, the IFN-γ variant comprises the sequence of SEQ ID NO: 19. In some embodiments, both subunits of the IFN-γ comprises the sequence of SEQ ID NO: 10. In some embodiments, the IFN-γ moiety is a recombinant “wildtype” IFN-γ comprising two wildtype IFN-γ subunits connected by a linker (e.g., any of SEQ ID NOs: 227-229), such as comprising the sequence of SEQ ID NO: 18.

[0234] IL-10

[0235] In some embodiments, the cytokine or variant thereof is IL-10 or variant thereof. Interleukin 10 (IL-10) is an α-helical cytokine that is expressed as a non-covalently linked homodimer of ˜37 kDa, also known as human cytokine synthesis inhibitory factor (CSIF). It plays a key role in the induction and maintenance of tolerance. IL-10 signals through a JAK-STAT complex. The IL-10 receptor (IL-10R) has two subunits, an a subunit that is primarily expressed on immune cells, particularly monocytes and macrophages with the highest expression, and an ubiquitously expressed p subunit. IL-10 is mainly produced by monocytes and, to a lesser extent, lymphocytes, including type-II T helper cells (TH2), mast cells, CD4⁺CD25⁺Foxp3⁺ regulatory T cells, and subsets of activated T cells and B cells. Dendritic cells and NK cells can also produce IL-10. IL-10 suppresses the secretion of pro-inflammatory cytokines like TNFα, IL-1, IL-6, IL-12 as well as Th1 cytokines such as IL-2 and IFN-γ and controls differentiation and proliferation of macrophages, B-cells and T-cells (Glocker, E. O. et al., Ann. N.Y. Acad. Sci. 1246, 102-107 (2011); Moore, K. W. et al., Annu. Rev. Immunol. 19, 683-765 (2001); R. de Waal Malefyt et al., J. Exp. Med. 174, 915-924 (1991); Williams, L. M. et al., Immunology 113, 281-292 (2004)). Moreover, it is a potent inhibitor of antigen presentation, inhibiting MHC II expression as well as upregulation of co-stimulatory molecules CD80 and CD86 (Mosser, D. M. & Zhang, X. Immunological Reviews 226, 205-218 (2008)). If IL-10 is not present or not functional, inflammation cannot be controlled. This makes IL-10 an attractive therapeutic candidate for autoimmune diseases. However, clinical trials using IL-10 and the development of a recombinant IL-10 (ilodecakin, TENOVIL®, Schering-Plough Research Institue, Kenilworth, N.J.) have been discontinued due to lack of efficacy. Recent studies have shed light on IL-10's potential role in tumor treatment (Fujii et al., (October 2001). “Interleukin-10 promotes the maintenance of antitumor CD8(+) T-cell effector function in situ”. Blood. 98(7):2143-51).

[0236] Monomeric native human IL-10 precursor polypeptide consists of 178 amino acid residues (amino acids 1-18 are signal peptide), while the monomeric mature IL-10 polypeptide consists of 160 amino acid residues (SEQ ID NO: 20). In some embodiments, the monomeric IL-10 moiety is a monomeric mature IL-10. In some embodiments, the monomeric IL-10 moiety is a polypeptide substantially homologous to amino acid sequence of SEQ ID NO: 20, e.g., having at least about 85% (such as at least about any of 90%, 91%, 92%, 93%, 94%, 95%, 96%, 97%, 98%, 99%, or 100%) amino acid sequence identity to SEQ ID NO: 20. In some embodiments, the IL-10 moiety (or subunit) is not glycosylated. In some embodiments, the IL-10 moiety (or subunit) is glycosylated. In some embodiments, the IL-10 moiety comprises two identical IL-10 monomers/subunits. In some embodiments, the IL-10 moiety comprises two different IL-10 monomers/subunits. For example, in some embodiments, the IL-10 moiety comprises one wildtype IL-10 monomer and one IL-10 variant monomer. In some embodiments, the IL-10 moiety comprises two IL-10 monomers (e.g., two IL-10 variant or wildtype monomers) linked together, such as via a peptide linker (e.g., any of SEQ ID NOs: 227-229) or a chemical linker, see e.g., a biologically active single chain IL-10 in US20130316404, the content of which is incorporated herein by reference in its entirety.

[0237] IL-10 amino acid residues N21, M22, R24, R32, H90, S31, and S93 are important in IL-10 receptor binding; residue R24 is crucial for IL-10 biological activity (Yoon et al., J Biol Chem. 2006; 281(46):35088-35096; E. S. Acuner-Ozbabacan et al. BMC Genomics. 2014; 15 Suppl 4(Suppl 4):S2).

[0238] In some embodiments, the monomeric IL-10 comprises the sequence of SEQ ID NO: 20. In some embodiments, the IL-10 variant comprises one or more mutations within one or both IL-10 subunits at a position selected from the group consisting of N21, M22, R24, D25, L26, R27, D28, A29, F30, S31, R32, H90, and S93 relative to a wildtype IL-10 subunit comprising the sequence of SEQ ID NO: 20. In some embodiments, the IL-10 variant comprises one or more mutations within one or both IL-10 subunits selected from the group consisting of R24A, D25A, L26A, R27A, D28A, A29S, F30A, S31A, and R32A relative to a wildtype IL-10 subunit comprising the sequence of SEQ ID NO: 20. In some embodiments, the IL-10 variant comprises one or more mutations within one or both IL-10 subunits selected from the group consisting of R24A, D25A/L26A, R27A, D28A/A29S, F30A/S31A, and R32A relative to a wildtype IL-10 subunit comprising the sequence of SEQ ID NO: 20. In some embodiments, the one or both subunits of the IL-10 variant comprises the sequence of any of SEQ ID NOs: 21-26. In some embodiments, the IL-10 variant comprises an R27A mutation within one or both IL-10 subunits relative to a wildtype IL-10 subunit comprising the sequence of SEQ ID NO: 20. In some embodiments, the one or both subunits of the IL-10 variant comprises the sequence of SEQ ID NO: 23. In some embodiments, the two subunits of the IL-10 or variant thereof are connected by a linker. In some embodiments, the IL-10 variant comprises the sequence of SEQ ID NO: 28. In some embodiments, both subunits of IL-10 comprises the sequence of SEQ ID NO: 20. In some embodiments, the IL-10 moiety is a recombinant “wildtype” IL-10 comprising two wildtype IL-10 monomers connected by a linker (e.g., any of SEQ ID NOs: 227-229), such as comprising the sequence of SEQ ID NO: 27.

[0239] IL-12

[0240] In some embodiments, the cytokine or variant thereof is IL-12 or variant thereof. IL-12 is a 70 kDa heterodimeric protein consisting of two covalently (disulfide bond) linked p35 (IL-12A) and p40 (IL-12B) subunits. P40 subunit is shared between IL-12 and IL-23. The active heterodimer (referred to as “p70”), and a homodimer of p40 are formed following protein synthesis. IL-12 is an interleukin belonging to the IL-12 family, which is the only family comprising heterodimeric cytokines, including IL-12, IL-23, IL-27, and IL-35. IL-12 is produced by dendritic cells, macrophages, neutrophils, and human B-lymphoblastoid cells (NC-37) in response to antigenic stimulation. IL-12 functions by binding to the IL-12 receptor (IL-12R), which is a heterodimeric receptor formed by IL-12Rβ1 and IL-12Rβ2, and in turn leading to JAK-STAT pathway activation. IL-12 promotes the development of Th1 responses and greatly induces IFNγ production by T and NK cells. IL-12's ability to activate both innate (NK cells) and adaptive (cytotoxic T lymphocytes) immunities has made it a promising candidate for cancer immunotherapy. Despite positive results from animal trials, IL-12 has only showed modest anti-tumor responses in clinical trials and was often accompanied by significant issues with toxicity (Lasek et al., Cancer Immunol Immunother., 2014). Treatment with IL-12 was associated with systemic flu-like symptoms (fever, chills, fatigue, erythromelalgia, or headache) and toxic effects on the bone marrow and liver. Dosing studies showed that patients could only tolerate doses under 1 μg/kg, far below the therapeutic dose. The result is that clinical trials with IL-12—used either as monotherapy or combined with other agents—failed to demonstrate potent sustained therapeutic efficacy ((Lasek et al., Cancer Immunol Immunother., 2014).

[0241] Native human p35 (IL-12A) precursor polypeptide consists of 219 amino acid residues (amino acids 1-22 are signal peptide), while the mature polypeptide consists of 197 amino acid residues (SEQ ID NO: 29). Native human p40 (IL-12B) precursor polypeptide consists of 328 amino acid residues (amino acids 1-22 are signal peptide), while the mature polypeptide consists of 306 amino acid residues (SEQ ID NO: 30). In some embodiments, the IL-12 moiety (or IL-12 subunit) is a mature IL-12 (or mature subunit). In some embodiments, the IL-12A (p35) subunit or variant thereof is a polypeptide substantially homologous to amino acid sequence of SEQ ID NO: 29, e.g., having at least about 85% (such as at least about any of 90%, 91%, 92%, 93%, 94%, 95%, 96%, 97%, 98%, 99%, or 100%) amino acid sequence identity to SEQ ID NO: 29. In some embodiments, the IL-12B (p40) subunit or variant thereof is a polypeptide substantially homologous to amino acid sequence of SEQ ID NO: 30, e.g., having at least about 85% (such as at least about any of 90%, 91%, 92%, 93%, 94%, 95%, 96%, 97%, 98%, 99%, or 100%) amino acid sequence identity to SEQ ID NO: 30. In some embodiments, the IL-12 (or subunit) or variant thereof is not glycosylated. In some embodiments, the IL-12 (or subunit) or variant thereof is glycosylated. In some embodiments, the IL-12 variant comprises one wildtype subunit (e.g., wt p35) and one mutant subunit (e.g., variant p40). In some embodiments, the IL-12 variant comprises two variant subunits (p35 variant and p40 variant). In some embodiments, the IL-12 variant comprises two wildtype subunits (e.g., wt p35 and p40) that are linked together via a synthetic peptide linker (e.g., any of SEQ ID NOs: 227-229) or a chemical linker.

[0242] Within the p40 subunit, amino acid residues that are important for IL-12 receptor binding are C177, E45, E59, and D62 (Luo et al. J MolBiol. 2010; 402(5):797-812). Studies suggested that an accessible N terminus of the p40 subunit is important for IL-12 bioactivity. Lieschke et al. constructed a single chain IL-12 (scIL-12) and noted that the order of the subunits affected IL-12 biologic activity: when the p35 subunit was at the N-terminus of p40 subunit, IL-12 activity greatly decreased; when p40 subunit was at the N-terminus of the p35 subunit, scIL-12 had biological activity comparable to rIL-12 (Lieschke et al. Nat Biotechnol. 1997; 15(1):35-40).

[0243] In some embodiments, the IL-12 moiety comprises a wildtype p35 subunit (SEQ ID NO: 29). In some embodiments, the IL-12 moiety comprises a variant p35 subunit. In some embodiments, the IL-12 moiety comprises a wildtype p40 subunit (SEQ ID NO: 30). In some embodiments, the IL-12 moiety comprises a variant p40 subunit. In some embodiments, the IL-12 moiety comprises a wildtype or variant p35 subunit and a wildtype or variant p40 subunit connected by a peptide linker (e.g., any of SEQ ID NOs: 227-229). In some embodiments, the IL-12 moiety comprises from N-terminus to C-terminus: wildtype or variant p40 subunit—linker (e.g., any of SEQ ID NOs: 227-229)—wildtype or variant p35 subunit. In some embodiments, the IL-12 moiety comprises from N-terminus to C-terminus: wildtype or variant p35 subunit—linker (e.g., any of SEQ ID NOs: 227-229)—wildtype or variant p40 subunit. In some embodiments, the IL-12 variant comprises one or more mutations within the p40 subunit at a position selected from the group consisting of E45, Q56, V57, K58, E59, F60, G61, D62, A63, G64, Q65, and C177 relative to a wildtype p40 subunit comprising the sequence of SEQ ID NO: 30. In some embodiments, the IL-12 variant comprises one or more mutations within the p40 subunit selected from the group consisting of Q56A, V57A, K58A, E59A, F60A, G61A, D62A, A63S, G64A, and Q65A relative to a wildtype p40 subunit comprising the sequence of SEQ ID NO: 30. In some embodiments, the p40 subunit of the IL-12 variant comprises the sequence of any of SEQ ID NOs: 31-34. In some embodiments, the IL-12 variant comprises an E59A/F60A mutation within the p40 subunit relative to a wildtype p40 subunit comprising the sequence of SEQ ID NO: 30. In some embodiments, the p40 subunit of the IL-12 variant comprises the sequence of SEQ ID NO: 31. In some embodiments, the IL-12 variant comprises an F60A mutation within the p40 subunit relative to a wildtype p40 subunit comprising the sequence of SEQ ID NO: 30. In some embodiments, the p40 subunit of the IL-12 variant comprises the sequence of SEQ ID NO: 33. In some embodiments, the p40 subunit and the p35 subunit of the IL-12 or variant thereof are connected by a linker. In some embodiments, the IL-12 variant comprises the sequence of SEQ ID NO: 36 or 275. In some embodiments, the IL-12 moiety is a recombinant “wildtype” IL-12 comprising a wildtype p35 subunit and a wildtype p40 subunit connected by a linker (e.g., any of SEQ ID NOs: 227-229), such as comprising the sequence of SEQ ID NO: 35.

[0244] IL-23

[0245] In some embodiments, the cytokine or variant thereof is IL-23 or variant thereof. Interleukin-23 (IL-23) belongs to the IL-12 cytokine family, is a heterodimeric cytokine consisting of an IL12B (p40) subunit (shared with IL-12) and the IL23A (p19) subunit. IL-23 functions through binding to IL-23 receptor composed of IL-12R β1 and IL-23R (p19 subunit binds IL-23R while p40 subunit binds IL-12Rβ1), resulting in Janus kinase 2 and Tyrosine kinase 2 kinases recruitment and phosphorylation of STAT3 and STAT4, leading to gene activation. STAT3 is responsible for key Th17 development characteristics such as RORγt expression, or transcription of Th17 cytokines such as IL-17, IL-21, IL-22, and GM-CSF which mediate protection against fungi and bacteria and participate in barrier immunity. IL-23 is mainly secreted by activated dendritic cells, macrophages or monocytes stimulated by antigen stimulus. IL-23 receptor is expressed on Th17 and NK cells. It was found that autoimmune and cancerous diseases are associated with IL-23 imbalance and increase. The most important function of IL-23 is its role in the development and differentiation of effector Th17 cells. In the context of chronic inflammation, activated DCs and macrophages produce IL-23, which promotes the development of Th17 cells. Autoimmune diseases such as psoriasis, Crohn's disease, rheumatoid arthritis, or multiple sclerosis have recently been found to be associated with IL-23-mediated signaling promoted by IL-23 receptor-expressing TH-17 and other lymphocyte subsets.

[0246] Native human p19 (IL-23A) precursor polypeptide consists of 189 amino acid residues (amino acids 1-19 are signal peptide), while the mature polypeptide consists of 170 amino acid residues (SEQ ID NO: 37). Native human p40 (IL-12B) precursor polypeptide consists of 328 amino acid residues (amino acids 1-22 are signal peptide), while the mature polypeptide consists of 306 amino acid residues (SEQ ID NO: 30). In some embodiments, the IL-23 moiety (or IL-23 subunit) is a mature IL-23 (or IL-23 mature subunit). In some embodiments, the IL-23A (p19) or variant thereof is a polypeptide substantially homologous to amino acid sequence of SEQ ID NO: 37, e.g., having at least about 85% (such as at least about any of 90%, 91%, 92%, 93%, 94%, 95%, 96%, 97%, 98%, 99%, or 100%) amino acid sequence identity to SEQ ID NO: 37. In some embodiments, the IL-12B (p40) subunit or variant thereof is a polypeptide substantially homologous to amino acid sequence of SEQ ID NO: 30, e.g., having at least about 85% (such as at least about any of 90%, 91%, 92%, 93%, 94%, 95%, 96%, 97%, 98%, 99%, or 100%) amino acid sequence identity to SEQ ID NO: 30. In some embodiments, the IL-23 (or subunit) or variant thereof is not glycosylated. In some embodiments, the IL-23 (or subunit) or variant thereof is glycosylated. In some embodiments, the IL-23 variant comprises one wildtype subunit (e.g., wt p19) and one mutant subunit (e.g., variant p40). In some embodiments, the IL-23 variant comprises two variant subunits (p19 variant and p40 variant). In some embodiments, the IL-23 variant comprises two wildtype subunits (e.g., wt p19 and p40) that are linked together via a synthetic peptide linker (e.g., any of SEQ ID NOs: 227-229) or a chemical linker. Within the p40 subunit, amino acid residues that are important for IL-23 receptor binding are C177, E45, E59, and D62 (Luo et al. J Mol Biol. 2010; 402(5):797-812).

[0247] In some embodiments, the IL-23 moiety comprises a wildtype p19 subunit (SEQ ID NO: 37). In some embodiments, the IL-23 moiety comprises a variant p19 subunit. In some embodiments, the IL-23 moiety comprises a wildtype p40 subunit (SEQ ID NO: 30). In some embodiments, the IL-23 moiety comprises a variant p40 subunit. In some embodiments, the IL-23 moiety comprises a wildtype or variant p19 subunit and a wildtype or variant p40 subunit connected by a peptide linker (e.g., any of SEQ ID NOs: 227-229). In some embodiments, the IL-23 moiety comprises from N-terminus to C-terminus: wildtype or variant p40 subunit—linker (e.g., any of SEQ ID NOs: 227-229)—wildtype or variant p19 subunit. In some embodiments, the IL-23 moiety comprises from N-terminus to C-terminus: wildtype or variant p19 subunit—linker (e.g., any of SEQ ID NOs: 227-229)—wildtype or variant p40 subunit. In some embodiments, the IL-23 variant comprises one or more mutations within the p40 subunit at a position selected from the group consisting of E45, Q56, V57, K58, E59, F60, G61, D62, A63, G64, Q65, and C177 relative to a wildtype p40 subunit comprising the sequence of SEQ ID NO: 30. In some embodiments, the IL-23 variant comprises one or more mutations within the p40 subunit selected from the group consisting of Q56A, V57A, K58A, E59A, F60A, G61A, D62A, A63S, G64A, and Q65A relative to a wildtype p40 subunit comprising the sequence of SEQ ID NO: 30. In some embodiments, the p40 subunit of the IL-23 variant comprises the sequence of any of SEQ ID NOs: 31-34. In some embodiments, the IL-23 variant comprises an E59A/F60A mutation within the p40 subunit relative to a wildtype p40 subunit comprising the sequence of SEQ ID NO: 30. In some embodiments, the p40 subunit of the IL-23 variant comprises the sequence of SEQ ID NO: 31. In some embodiments, the p40 subunit and the p19 subunit of the IL-23 or variant thereof are connected by a linker (e.g., any of SEQ ID NOs: 227-229). In some embodiments, the IL-23 variant comprises the sequence of SEQ ID NO: 39. In some embodiments, the IL-23 moiety is a recombinant “wildtype” IL-23 comprising a wildtype p35 subunit and a wildtype p40 subunit connected by a linker (e.g., any of SEQ ID NOs: 227-229), such as comprising the sequence of SEQ ID NO: 38.

[0248] IL-17

[0249] In some embodiments, the cytokine or variant thereof is IL-17 or variant thereof. The IL-17 family comprises IL17A, IL-17B, IL-17C, IL-17D, IL-17E (a.k.a. IL-25) and IL-17F. Interleukin 17A (IL-17A or IL-17) is a disulfide-linked, homodimeric, secreted glycoprotein with a molecular mass of about 35 kDa. Each subunit of the homodimer is approximately 15-20 KDa. IL-17A is a pro-inflammatory cytokine produced by T helper 17 (Th17) cells in response to their stimulation with IL-23. IL-17 interacts with IL-17R and activates several signaling cascades that, in turn, lead to the induction of chemokines. These chemokines act as chemoattractant to recruit immune cells, such as monocytes and neutrophils to the site of inflammation.

### Activities of Cytokines or Variants Thereof

[0250] The “activity” of a cytokine or a variant thereof described herein comprises the binding affinity of the cytokine or a variant thereof to corresponding cytokine receptor; and/or the biological activity (or bioactivity) of the cytokine or a variant thereof, such as inducing or inhibiting signal transduction, inducing or inhibiting cell proliferation, differentiation, and/or activation, inducing or inhibiting the secretion of effecting cytokine(s) (e.g., pro-inflammatory cytokines), etc., upon cytokine/cytokine receptor binding. These biological activities are also referred to herein as direct biological activities. In some embodiments, the biological activity of a cytokine or a variant thereof also comprises indirect biological activities, such as any biological activity resulting from the direct biological activities. For example, in some embodiments, the biological activity also comprises cancer cell killing by immune cells attracted to the tumor site due to the secreted effecting cytokines, such as inflammatory markers IL-6, IP-2 (GRO-0)/CXCL2, G-CSF/CSF3, TIMP-1, KC (GRO-α)/CXCL1, etc.

[0251] In some embodiments, in the presence of binding of the antigen-binding protein (e.g., antibody (e.g., full-length antibody), or ligand/receptor-hinge-Fc fusion protein) or antigen binding fragment (e.g., ligand, receptor, VHH, scFv, or Fab) of the immunocytokine described herein to the target antigen, the activity (binding affinity to corresponding cytokine receptor or subunit thereof, and/or biological activity) of the cytokine or variant thereof increases at least about 20% (such as at least about any of 30%, 40%, 50%, 60%, 70%, 80%, 90%, 100%, 200%, 300%, 400%, 500%, or more) compared to that in the absence of binding of the antigen-binding protein (e.g., antibody, or ligand/receptor-hinge-Fc fusion protein) or antigen-binding fragment to the target antigen. In some embodiments, in the presence of binding of the antigen-binding protein (e.g., antibody (e.g., full-length antibody), or ligand/receptor-hinge-Fc fusion protein) or antigen-binding fragment (e.g., ligand, receptor, VHH, scFv, or Fab) of the immunocytokine described herein to the target antigen, the activity (binding affinity to corresponding cytokine receptor or subunit thereof, and/or biological activity) of the cytokine or variant thereof increases to at least about 2-fold (such as at least about any of 3, 4, 5, 6, 7, 8, 9, 10, 20, 30, 40, 50, 60, 70, 80, 90, or 100-fold) of that in the absence of binding of the antigen-binding protein (e.g., antibody, or ligand/receptor-hinge-Fc fusion protein) or antigen-binding fragment to the target antigen.

[0252] In some embodiments, in the absence of binding of the antigen-binding protein (e.g., antibody (e.g., full-length antibody), or ligand/receptor-hinge-Fc fusion protein) or antigen-binding fragment (e.g., ligand, receptor, VHH, scFv, or Fab) of the immunocytokine described herein to the target antigen, the activity (binding affinity to corresponding cytokine receptor or subunit thereof, and/or biological activity) of the cytokine or variant thereof positioned at the hinge region of the antigen-binding polypeptide (such as positioned at the hinge region of a heavy chain of an antibody (e.g., full-length antibody), or positioned at the hinge region between an antigen binding fragment (e.g., ligand, receptor, VHH, scFv, or Fab) and an Fc domain subunit (or portion thereof), see FIGS. 2A-4C) is no more than about 70% (such as no more than about any of 60%, 50%, 40%, 30%, 20%, 10%, 9%, 8%, 7%, 6%, 5%, 4%, 3%, 2%, 1%, 0.9%, 0.8%, 0.7%, 0.6%, 0.5%, 0.4%, 0.3%, 0.2%, 0.1%, or 0%) of that of a corresponding cytokine or variant thereof in a free state.

[0253] In some embodiments, the “corresponding cytokine or variant thereof” is the same as the cytokine or variant thereof positioned at the hinge region, but expressed under a different state or at a different position. A cytokine or variant thereof “in a free state” herein refers to a cytokine or variant thereof in a soluble form, without attaching to any moiety such as cell membrane or another molecule (e.g., Fc fragment, or N-terminus or C-terminus of a full-length antibody or antigen binding fragment (e.g., ligand, receptor, VHH, scFv, or Fab)).

[0254] In some embodiments, in the absence of binding of the antigen-binding protein (e.g., antibody (e.g., full-length antibody), or ligand/receptor-hinge-Fc fusion protein) or antigen binding fragment (e.g., ligand, receptor, VHH, scFv, or Fab) of the immunocytokine described herein to the target antigen, the activity (binding affinity to corresponding cytokine receptor or subunit thereof, and/or biological activity) of the cytokine or variant thereof positioned at the hinge region of the antigen-binding polypeptide (such as positioned at the hinge region of a heavy chain of an antibody (e.g., full-length antibody), or positioned at the hinge region between an antigen binding fragment (e.g., ligand, receptor, VHH, scFv, or Fab) and an Fc domain subunit (or portion thereof), see FIGS. 2A-4C)) is no more than about 70% (such as no more than about any of 60%, 50%, 40%, 30%, 20%, 10%, 9%, 8%, 7%, 6%, 5%, 4%, 3%, 2%, 1%, 0.9%, 0.8%, 0.7%, 0.6%, 0.5%, 0.4%, 0.3%, 0.2%, 0.1%, or 0%) of that of a corresponding cytokine or variant thereof in a free state; and in the presence of binding of the antigen-binding protein (e.g., antibody (e.g., full-length antibody), or ligand/receptor-hinge-Fc fusion protein) or antigen-binding fragment (e.g., ligand, receptor, VHH, scFv, or Fab) of the immunocytokine described herein to the target antigen, the activity (binding affinity to corresponding cytokine receptor or subunit thereof, and/or biological activity) of the cytokine or variant thereof increases at least about 20% (such as at least about any of 30%, 40%, 50%, 60%, 70%, 80%, 90%, 100%, 200%, 300%, 400%, 500%, or more) compared to that in the absence of binding of the antigen-binding protein (e.g., antibody (e.g., full-length antibody), or ligand/receptor-hinge Fc fusion protein) or antigen-binding fragment (e.g., ligand, receptor, VHH, scFv, or Fab) to the target antigen.

[0255] In some embodiments, in the absence of binding of the full-length antibody to the target antigen, the activity (binding affinity to corresponding cytokine receptor or subunit thereof, and/or biological activity) of the cytokine or variant thereof positioned at the hinge region of a heavy chain of the full-length antibody is no more than about 50% (such as no more than about any of 40%, 30%, 20%, 10%, 9%, 8%, 7%, 6%, 5%, 4%, 3%, 2%, 1%, 0.9%, 0.8%, 0.7%, 0.6%, 0.5%, 0.4%, 0.3%, 0.2%, 0.1%, or 0%) of that of a corresponding cytokine or variant thereof expressed at any of: i) the N-terminus of a VH of the full-length antibody, ii) the N-terminus of a VL of the full-length antibody, iii) the C-terminus of a heavy chain of the full-length antibody, iv) the C-terminus of a CL of the full-length antibody, and v) the N-terminus of an Fc domain subunit of the full-length antibody. In some embodiments, in the absence of binding of the antigen-binding fragment (e.g., scFv or Fab) to the target antigen, the activity (binding affinity to corresponding cytokine receptor or subunit thereof, and/or biological activity) of the cytokine or variant thereof positioned at the hinge region between the antigen binding fragment (e.g., scFv or Fab) and an Fc domain subunit (or portion thereof) (see FIGS. 3A-3C) is no more than about 50% (such as no more than about any of 40%, 30%, 20%, 10%, 9%, 8%, 7%, 6%, 5%, 4%, 3%, 2%, 1%, 0.9%, 0.8%, 0.7%, 0.6%, 0.5%, 0.4%, 0.3%, 0.2%, 0.1%, or 0%) of that of a corresponding cytokine or variant thereof expressed at any of: i) the N-terminus of a VH of the antigen binding fragment (e.g., scFv or Fab), ii) the N-terminus of a VL of the antigen binding fragment (e.g., scFv or Fab), iii) the C-terminus of the Fc domain subunit (or portion thereof), iv) the C-terminus of a CL of the antigen binding fragment (Fab), and v) the N-terminus of the Fc domain subunit. In some embodiments, in the absence of binding of the antigen-binding fragment (e.g., VHH, ligand, or receptor) to the target antigen, the activity (binding affinity to corresponding cytokine receptor or subunit thereof, and/or biological activity) of the cytokine or variant thereof positioned at the hinge region between the antigen binding fragment (e.g., VHH, ligand, or receptor) and an Fc domain subunit (or portion thereof) (see FIGS. 4A-4C) is no more than about 50% (such as no more than about any of 40%, 30%, 20%, 10%, 9%, 8%, 7%, 6%, 5%, 4%, 3%, 2%, 1%, 0.9%, 0.8%, 0.7%, 0.6%, 0.5%, 0.4%, 0.3%, 0.2%, 0.10%, or 0%) of that of a corresponding cytokine or variant thereof expressed at any of: i) the N-terminus of the antigen-binding fragment (e.g., VHH, ligand, or receptor), ii) the C-terminus of the Fc domain subunit (or portion thereof), and iii) the N-terminus of the Fc domain subunit.

[0256] In some embodiments, in the presence of binding of the full-length antibody to the target antigen, the activity (binding affinity to corresponding cytokine receptor or subunit thereof, and/or biological activity) of the cytokine or variant thereof positioned at the hinge region of a heavy chain of the full-length antibody is at least about 70% (such as at least about any of 80%, 90%, 100%, 110%, 120%, 130%, 140%, 150%, 160%, 170%, 180%, 190%, 200%, 300%, 400%, 500%, or more) of that of a corresponding cytokine or variant thereof expressed at any of: i) the N-terminus of a VH of the full-length antibody, ii) the N-terminus of a VL of the full-length antibody, iii) the C-terminus of a heavy chain of the full-length antibody, iv) the C-terminus of a CL of the full-length antibody, and v) the N-terminus of an Fc subunit of the full-length antibody. In some embodiments, in the presence of binding of the antigen binding fragment (e.g., scFv or Fab) to the target antigen, the activity (binding affinity to corresponding cytokine receptor or subunit thereof, and/or biological activity) of the cytokine or variant thereof positioned at the hinge region between the antigen binding fragment (e.g., scFv or Fab) and an Fc domain subunit (or portion thereof) (see FIGS. 3A-3C) is at least about 70% (such as at least about any of 80%, 90%, 100%, 110%, 120%, 130%, 140%, 150%, 160%, 170%, 180%, 190%, 200%, 300%, 400%, 500%, or more) of that of a corresponding cytokine or variant thereof expressed at any of: i) the N-terminus of a VH of the antigen binding fragment (e.g., scFv or Fab), ii) the N-terminus of a VL of the antigen binding fragment (e.g., scFv or Fab), iii) the C-terminus of the Fc domain subunit (or portion thereof), iv) the C-terminus of a CL of the antigen binding fragment (Fab), and v) the N-terminus of the Fc domain subunit. In some embodiments, in the presence of binding of the antigen binding fragment (e.g., VHH, ligand, or receptor) to the target antigen, the activity (binding affinity to corresponding cytokine receptor or subunit thereof, and/or biological activity) of the cytokine or variant thereof positioned at the hinge region between the antigen binding fragment (e.g., VHH, ligand, or receptor) and an Fc domain subunit (or portion thereof) (see FIGS. 4A-4C) is at least about 70% (such as at least about any of 80%, 90%, 100%, 110%, 120%, 130%, 140%, 150%, 160%, 170%, 180%, 190%, 200%, 300%, 400%, 500%, or more) of that of a corresponding cytokine or variant thereof expressed at any of: i) the N-terminus of the antigen-binding fragment (e.g., VHH, ligand, or receptor), ii) the C-terminus of the Fc domain subunit (or portion thereof), and iii) the N-terminus of the Fc domain subunit.

[0257] In some embodiments, in the absence of binding of the full-length antibody to the target antigen, the activity (binding affinity to corresponding cytokine receptor or subunit thereof, and/or biological activity) of the cytokine or variant thereof positioned at the hinge region of a heavy chain of the full-length antibody is no more than about 50% (such as no more than about any of 40%, 30%, 20%, 10%, 9%, 8%, 7%, 6%, 5%, 4%, 3%, 2%, 1%, 0.9%, 0.8%, 0.7%, 0.6%, 0.5%, 0.4%, 0.3%, 0.2%, 0.1%, or 0%) of that of a corresponding cytokine or variant thereof expressed at any of: i) the N-terminus of a VH of the full-length antibody, ii) the N-terminus of a VL of the full-length antibody, iii) the C-terminus of a heavy chain of the full-length antibody, iv) the C-terminus of a CL of the full-length antibody, and v) the N-terminus of an Fc domain subunit of the full-length antibody; and in the presence of binding of the full-length antibody to the target antigen, the activity (binding affinity to corresponding cytokine receptor or subunit thereof, and/or biological activity) of the cytokine or variant thereof positioned at the hinge region of a heavy chain of the full-length antibody is at least about 70% (such as at least about any of 80%, 90%, 100%, 110%, 120%, 130%, 140%, 150%, 160%, 170%, 180%, 190%, 200%, 300%, 400%, 500%, or more) of that of a corresponding cytokine or variant thereof expressed at any of: i) the N-terminus of a VH of the full-length antibody, ii) the N-terminus of a VL of the full-length antibody, iii) the C-terminus of a heavy chain of the full-length antibody, iv) the C-terminus of a CL of the full-length antibody, and v) the N-terminus of an Fc subunit of the full-length antibody. In some embodiments, in the absence of binding of the antigen binding fragment (e.g., scFv or Fab) to the target antigen, the activity (binding affinity to corresponding cytokine receptor or subunit thereof, and/or biological activity) of the cytokine or variant thereof positioned at the hinge region between the antigen binding fragment (e.g., scFv or Fab) and an Fc domain subunit (or portion thereof) (see FIGS. 3A-3C) is no more than about 50% (such as no more than about any of 40%, 30%, 20%, 10%, 9%, 8%, 7%, 6%, 5%, 4%, 3%, 2%, 1%, 0.9%, 0.8%, 0.7%, 0.6%, 0.5%, 0.4%, 0.3%, 0.2%, 0.1%, or 0%) of that of a corresponding cytokine or variant thereof expressed at any of: i) the N-terminus of a VH of the antigen binding fragment (e.g., scFv or Fab), ii) the N-terminus of a VL of the antigen binding fragment (e.g., scFv or Fab), iii) the C-terminus of the Fc domain subunit (or portion thereof), iv) the C-terminus of a CL of the antigen binding fragment (Fab), and v) the N-terminus of the Fc domain subunit; and in the presence of binding of the antigen binding fragment (e.g., scFv or Fab) to the target antigen, the activity (binding affinity to corresponding cytokine receptor or subunit thereof, and/or biological activity) of the cytokine or variant thereof positioned at the hinge region between the antigen binding fragment (e.g., scFv or Fab) and an Fc domain subunit (or portion thereof) is at least about 70% (such as at least about any of 80%, 90%, 100%, 110%, 120%, 130%, 140%, 150%, 160%, 170%, 180%, 190%, 200%, 300%, 400%, 500%, or more) of that of a corresponding cytokine or variant thereof expressed at any of: i) the N-terminus of a VH of the antigen binding fragment (e.g., scFv or Fab), ii) the N-terminus of a VL of the antigen binding fragment (e.g., scFv or Fab), iii) the C-terminus of the Fc domain subunit (or portion thereof), iv) the C-terminus of a CL of the antigen binding fragment (Fab), and v) the N-terminus of the Fc domain subunit. In some embodiments, in the absence of binding of the antigen binding fragment (e.g., VHH, ligand, or receptor) to the target antigen, the activity (binding affinity to corresponding cytokine receptor or subunit thereof, and/or biological activity) of the cytokine or variant thereof positioned at the hinge region between the antigen binding fragment (e.g., VHH, ligand, or receptor) and an Fc domain subunit (or portion thereof) (see FIGS. 4A-4C) is no more than about 50% (such as no more than about any of 40%, 30%, 20%, 10%, 9%, 8%, 7%, 6%, 5%, 4%, 3%, 2%, 1%, 0.9%, 0.8%, 0.7%, 0.6%, 0.5%, 0.4%, 0.3%, 0.2%, 0.1%, or 0%) of that of a corresponding cytokine or variant thereof expressed at any of: i) the N-terminus of the antigen-binding fragment (e.g., VHH, ligand, or receptor), ii) the C-terminus of the Fc domain subunit (or portion thereof), and iii) the N-terminus of the Fc domain subunit; and in the presence of binding of the antigen binding fragment (e.g., VHH, ligand, or receptor) to the target antigen, the activity (binding affinity to corresponding cytokine receptor or subunit thereof, and/or biological activity) of the cytokine or variant thereof positioned at the hinge region between the antigen binding fragment (e.g., VHH, ligand, or receptor) and an Fc domain subunit (or portion thereof) is at least about 70% (such as at least about any of 80%, 90%, 100%, 110%, 120%, 130%, 140%, 150%, 160%, 170%, 180%, 190%, 200%, 300%, 400%, 500%, or more) of that of a corresponding cytokine or variant thereof expressed at any of: i) the N-terminus of the antigen-binding fragment (e.g., VHH, ligand, or receptor), ii) the C-terminus of the Fc domain subunit (or portion thereof), and iii) the N-terminus of the Fc domain subunit.

[0258] In some embodiments, the cytokine or variant thereof is a cytokine variant. In some embodiments, the activity (binding affinity to corresponding cytokine receptor or subunit thereof, and/or biological activity) of the cytokine variant in a free state is no more than about 80% (such as no more than about any of 70%, 60%, 50%, 40%, 30%, 20%, 10%, or 5%) of that of a corresponding wildtype cytokine in a free state. In some embodiments, the activity (binding affinity to corresponding cytokine receptor or subunit thereof, and/or biological activity) of the cytokine variant in a free state is the same or similar (such as within about ±20% difference) of that of a corresponding wildtype cytokine in a free state.

[0259] In some embodiments, in the absence of binding of the antigen-binding protein (e.g., antibody (e.g., full-length antibody), or ligand/receptor-hinge-Fc fusion protein) or antigen binding fragment (e.g., ligand, receptor, VHH, scFv, or Fab) of the immunocytokine described herein to the target antigen, the activity (binding affinity to corresponding cytokine receptor or subunit thereof, and/or biological activity) of the cytokine variant positioned at the hinge region of the antigen-binding polypeptide (such as positioned at the hinge region of a heavy chain of the antibody (e.g., full-length antibody), or positioned at the hinge region between an antigen binding fragment (e.g., ligand, receptor, VHH, scFv, or Fab) and an Fc domain subunit (or portion thereof)) is no more than about 80% (such as no more than about any of 70%, 60%, 50%, 40%, 30%, 20%, 10%, 9%, 8%, 7%, 6%, 5%, 4%, 3%, 2%, 1%, 0.9%, 0.8%, 0.7%, 0.6%, 0.5%, 0.4%, 0.3%, 0.2%, 0.1%, or 0%) of that of a corresponding wildtype cytokine (or a corresponding recombinant “wildtype” cytokine expressed in the same format but comprising wildtype subunits) positioned at the same region. For example, in some embodiments, the IL-12 variant comprises from N-terminus to C-terminus: variant p40 subunit—linker (e.g., any of SEQ ID NOs: 227-229)—wildtype p35 subunit, and the corresponding recombinant “wildtype” IL-12 comprises from N-terminus to C-terminus: wildtype p40 subunit—linker (e.g., any of SEQ ID NOs: 227-229)—wildtype p35 subunit. In some embodiments, the cytokine variant is an IL-2 variant, and the corresponding wildtype cytokine is a “wildtype” IL-2.

[0260] In some embodiments, in the presence of binding of the antigen-binding protein (e.g., antibody (e.g., full-length antibody), or ligand/receptor-hinge-Fc fusion protein) or antigen binding fragment (e.g., ligand, receptor, VHH, scFv, or Fab) of the immunocytokine described herein to the target antigen, the activity (binding affinity to corresponding cytokine receptor or subunit thereof, and/or biological activity) of the cytokine variant positioned at the hinge region of the antigen-binding polypeptide (such as positioned at the hinge region a heavy chain of an antibody (e.g., full-length antibody), or positioned at the hinge region between an antigen binding fragment (e.g., ligand, receptor, VHH, scFv, or Fab) and an Fc domain subunit (or portion thereof)) is at least about 1% (such as at least about any of 2%, 3%, 4%, 5%, 6%, 7%, 8%, 9%, 10%, 20%, 30%, 40%, 50%, 60%, 70%, 80%, 90%, 100%, 110%, 120%, 130%, 140%, 150%, 160%, 170%, 180%, 190%, 200%, or more) of that of a corresponding wildtype cytokine (or a corresponding recombinant “wildtype” cytokine expressed in the same format but comprising wildtype subunits) positioned at the same region.

[0261] In some embodiments, in the absence of binding of the antigen-binding protein (e.g., antibody (e.g., full-length antibody), or ligand/receptor-hinge-Fc fusion protein) or antigen binding fragment (e.g., ligand, receptor, VHH, scFv, or Fab) of the immunocytokine described herein to the target antigen, the activity (binding affinity to corresponding cytokine receptor or subunit thereof, and/or biological activity) of the cytokine variant positioned at the hinge region of the antigen-binding polypeptide (such as positioned at the hinge region of a heavy chain of an antibody (e.g., full-length antibody), or positioned at the hinge region between an antigen binding fragment (e.g., ligand, receptor, VHH, scFv, or Fab) and an Fc domain subunit (or portion thereof)) is no more than about 80% (such as no more than about any of 70%, 60%, 50%, 40%, 30%, 20%, 10%, 9%, 8%, 7%, 6%, 5%, 4%, 3%, 2%, 1%, 0.9%, 0.8%, 0.7%, 0.6%, 0.5%, 0.4%, 0.3%, 0.2%, 0.1%, or 0%) of that of a corresponding wildtype cytokine (or a corresponding recombinant “wildtype” cytokine in the same format but comprising wildtype subunits) positioned at the same region; and in the presence of binding of the antigen-binding protein (e.g., antibody (e.g., full-length antibody), or ligand/receptor-hinge-Fc fusion protein) or antigen binding fragment (e.g., ligand, receptor, VHH, scFv, or Fab) of the immunocytokine described herein to the target antigen, the activity (binding affinity to corresponding cytokine receptor or subunit thereof, and/or biological activity) of the cytokine variant positioned at the hinge region of the antigen-binding polypeptide (such as positioned at the hinge region of a heavy chain of an antibody (e.g., full-length antibody), or positioned at the hinge region between an antigen binding fragment (e.g., ligand, receptor, VHH, scFv, or Fab) and an Fc domain subunit (or portion thereof)) is at least about 1% (such as at least about any of 2%, 3%, 4%, 5%, 6%, 7%, 8%, 9%, 10%, 20%, 30%, 40%, 50%, 60%, 70%, 80%, 90%, 100%, 110%, 120%, 130%, 140%, 150%, 160%, 170%, 180%, 190%, 200%, or more) of that of a corresponding wildtype cytokine (or a corresponding recombinant “wildtype” cytokine in the same format but comprising wildtype subunits) positioned at the same region.

[0262] Binding Affinity

[0263] Binding affinity of a molecule (e.g., cytokine moiety, or immunocytokine comprising a cytokine moiety) and its binding partner (e.g., cytokine receptor or subunits thereof) can be determined experimentally by any suitable ligand binding assays or antibody/antigen binding assays known in the art, e.g., Western blots, sandwich enzyme-linked immunosorbent assay (ELISA), Meso Scale Discovery (MSD) electrochemiluminescence, bead based multiplex immunoassays (MIA), RIA, Surface Plasma Resonance (SPR), ECL, IRMA, FACS, EIA, Biacore assay, Octet analysis, peptide scans, etc. For example, easy analysis is possible by using the cytokine or variant thereof, immunocytokine comprising the cytokine or variant thereof, or its corresponding receptor or subunits thereof marked with a variety of marker agents, as well as by using BiacoreX (made by Amersham Biosciences), which is an over-the-counter, measuring kit, or similar kit, according to the user's manual and experiment operation method attached with the kit.

[0264] In some embodiments, protein microarray is used for analyzing the interaction, function and activity of the cytokine moiety or immunocytokine described herein to its corresponding cytokine receptor, on a large scale. The protein chip has a support surface bound with a range of capture proteins (e.g., cytokine receptor or subunits thereof). Fluorescently labeled probe molecules (e.g., cytokine moiety or immunocytokine described herein) are then added to the array and upon interaction with the bound capture protein, a fluorescent signal is released and read by a laser scanner.

[0265] In some embodiments, the binding affinity of a cytokine moiety or immunocytokine described herein and its corresponding cytokine receptor (or subunit thereof) is measured using SPR (Biacore T-200). For example, anti-human antibody is coupled to the surface of a CM-5 sensor chip (e.g., using EDC/NHS chemistry). Then a human cytokine receptor-Fc fusion protein (e.g., IL-2Rα-Fc, IL-2Rβ-Fc, IL-2Rγ-Fc) is used as the captured ligand over this surface. Serial dilutions of immunocytokine comprising a cytokine moiety (e.g., IL-2 variant) are allowed to bind to the captured ligands (free state IL-2 variant serves as control), and the response units (RU) can be plotted against immunocytokine concentration to determine EC50 values, or plotted against time to monitor the binding and dissociation of immunocytokine to cytokine receptor-Fc in real time. Equilibrium dissociation constant (K_{D}) and dissociation rate constant can be determined by performing kinetic analysis using Biacore evaluation software. The binding affinity of each test immunocytokine to the cytokine receptor can be calculated as percentage relative to that of a corresponding free state cytokine moiety. In some embodiments, a cell line expressing a cytokine receptor (e.g., IL-2R) on the cell surface is incubated with an immunocytokine comprising a cytokine moiety (e.g., IL-2 variant) described herein, after incubation, the cells are washed, then an anti-IgG-conjugated with fluorescent protein (e.g., APC) is added to detect binding affinity of the immunocytokine to the cells, such as by FACS.

[0266] In some embodiments, the K_{D} of the binding between the cytokine or variant thereof in free state and its corresponding cytokine receptor (or subunits thereof) is about any of ≤10⁻⁵ M ≤10⁻⁶M, ≤10⁻⁷ M, ≤10⁻⁸ M, ≤10⁻⁹ M, ≤10¹⁰ M, ≤10⁻¹¹ M, or ≤10⁻¹ M. In some embodiments, in the absence of binding of the antigen-binding protein (e.g., antibody (e.g., full-length antibody), or ligand/receptor-hinge-Fc fusion protein) or antigen-binding fragment (e.g., ligand, receptor, VHH, scFv, or Fab) of the immunocytokine described herein to the target antigen, the K_{D} of the binding between the cytokine or variant thereof positioned at the hinge region of the antigen-binding polypeptide (such as positioned at the hinge region of a heavy chain of the antibody (e.g., full-length antibody), or positioned at the hinge region between an antigen binding fragment (e.g., ligand, receptor, VHH, scFv, or Fab) and an Fc domain subunit (or portion thereof)) and its corresponding cytokine receptor (or subunits thereof) is undetectable (e.g., no binding), or the K_{D} is higher than (i.e., binds weaker than) that in the presence of binding of the antigen-binding protein (e.g., antibody (e.g., full-length antibody), or ligand/receptor-hinge-Fc fusion protein) or antigen binding fragment (e.g., ligand, receptor, VHH, scFv, or Fab) of the immunocytokine described herein to the target antigen.

[0267] Biological Activity

[0268] Various methods for determining the biological activities (or bioactivities) of cytokines or variants thereof, or immunocytokines described herein are described in the art, such as bioassays. Any cytokine assays known in the art can be adapted to test bioactivities of cytokine moieties or immunocytokines described herein.

[0269] A bioassay focuses on biological activity of cytokines and using it as a read out. In a bioassay, the activity of a sample is tested on a sensitive cell line (e.g., primary cell cultures or in vitro adapted cell lines that are dependent and/or responsive to the test sample) and the results of this activity (e.g., cellular proliferation) are compared to a standard cytokine preparation. Other aspects of biological activity of cytokines include induction of further cytokine secretion, induction of killing, antiviral activity, degranulation, cytotoxicity, chemotaxis, and promotion of colony formation. In vitro assays to measure all of these activities are available. See, e.g., “Cytokine Bioassays” of Bioassays—BestProtocols®, from eBioscience® (http://tools.thermofisher.com/content/sfs/manuals/cytokine-bioassays.pdf), the content of which is incorporated herein by reference in its entirety.

[0270] For example, in a cytokine-induced proliferation assay, samples (e.g., IL-2 moiety or IL-2 immunocytokine) and standard (e.g., IL-2 in free state) are diluted via serial dilution in an assay plate filled with culture medium, indicator cells (e.g., CTLL-2, or PBMC stimulated with anti-CD3 Ab) are washed and resuspend in culture medium then added into each well. The cells are incubated for sufficient time (e.g., 24 hours or longer) at 37° C., 5% C02 in a humidified incubator.

[0271] Then cell viability test agents (e.g., resazurin, MTT assay agents) can be added to the plate and allow for sufficient incubation, then read with spectrophotometer. The EC50 values (concentration of test sample required to exhibit 50% of maximal response) for cell proliferation can then be obtained from non-linear regression analysis of dose-response curves. Cell number can also be counted under microscope, and compare to that treated with standard or control. For another example, in a cytokine-induced cytokine production assay, samples (e.g., IL-12 or IL-23 moiety, or IL-12 or IL-23 immunocytokine) and standard (e.g., IL-12 or IL-23 in free state) are diluted via serial dilution in an assay plate filled with culture medium, indicator cells (e.g., splenocytes, activated CD4+ T cells, or activated CD8+ T cells) are washed and resuspend in culture medium then added into each well. Cells are incubated for sufficient time (e.g., 24-48 hours) at 37° C., 5% C02 in a humidified incubator, then supernatants are harvest for determination of cytokine expression by ELISA, following ELISA protocol for target cytokine of interest (e.g., IFN-γ). For another example, in a cytokine-induced cell surface marker expression assay, samples (e.g., IFN-γ moiety, or IFN-γ immunocytokine) and standard (e.g., IFN-γ in free state) are diluted via serial dilution in an assay plate filled with culture medium, indicator cells (e.g., HEK-Blue™ IFN-γ cells) are washed and resuspend in culture medium then added into each well. Cells are incubated for sufficient time (e.g., 24-48 hours) at 37° C., 5% C02 in a humidified incubator, then cell surface expression of biomarker (e.g., PD-L1) can be detected (e.g., using anti-human PD-L1 APC-conjugated antibody) and measured by ELISA or FACS. Also see Examples 1, 5, and 11 for exemplary methods.

[0272] Bioactivities of cytokine moieties or immunocytokines described herein can also be reflected by in vivo or ex vivo experiments, for example, by measuring the proliferation of indicator cells (e.g., after administering IL-2 moieties or IL-2 immunocytokines, the proliferation of CD8+ cells, NK cells, or Tregs); by measuring the induction or inhibition of cytokine secretion; by measuring tumor volume reduction in tumor xenograft mice after injecting the test cytokine moieties or immunocytokines described herein; or by measuring autoimmune score.

[0273] Cell signaling assays can also be used to test bioactivities of cytokine moieties or immunocytokines described herein. Various cell signaling assay kits are commercially available, for example, to detect analytes produced during enzymatic reactions involved in signaling such as ADP, AMP, UDP, GDP, and growth factors, or phosphatase assays, to quantify both total and phosphorylated forms of signaling proteins. For example, after incubating the cells with cytokine moieties or immunocytokines described herein, to determine whether a particular kinase is active, the cell lysate is exposed to a known substrate for the enzyme in the presence of radioactive phosphate. The products are separated by electrophoresis (with or without immunoprecipitation), then the gel is exposed to x-ray film to determine whether the proteins incorporated the isotope. In some embodiments, the bioactivities of cytokine moieties or immunocytokines described herein on cells are measured by immunohistochemistry to locate signaling proteins. For example, antibodies to the signal proteins themselves or signal proteins in their activated state can be used. These antibodies have recognition epitopes that include the phosphate or other activating conformation. In some embodiments, movement of specific signaling proteins (e.g., nuclear translocation of signaling molecules) can be tracked by incorporating a fluorescent protein gene, e.g., green fluorescent protein (GFP), into genetic vectors encoding the protein to be studied. In some embodiments, bioactivities of cytokine moieties or immunocytokines described herein on cells are tested by western blots. For example, all tyrosine-phosphorylated proteins (or other phosphorylated amino acids, e.g., serine or threonine) can be detected with an anti-phosphotyrosine antibody (or antibodies against other phosphorylated amino acids) on a Western blot of cell lysates obtained after stimulation in a temporal sequence. In some embodiments, the bioactivities of cytokine moieties or immunocytokines described herein on cells can be measured by immunoprecipitation. For example, primary antibodies to a specific signaling protein or all tyrosine-phosphorylated proteins are cross-linked to the beads. The cells after incubating with cytokine moieties or immunocytokines described herein are lysed in buffer containing protease inhibitors and then incubated with the antibody-coated beads. The proteins are separated by using SDS electrophoresis, and then the proteins are identified by using the procedures described for Western blots. In some embodiments, glutathione S-transferase (GST) binding, or “pull-down” assay, can also be used, which determines direct protein-protein (e.g., signaling protein) interactions. Cell-based signal transduction assays can also be used. Briefly, a reporter cell line (e.g., HEK-Blue™) stably expressing the corresponding receptor of the test cytokine moiety or immunocytokine, corresponding signaling factors of the cytokine signaling pathway (e.g., STAT, JAK), and cytokine signaling pathway-inducible reporter (e.g., fluorescent protein, or secreted embryonic alkaline phosphatase) can be cultured in the presence of the test cytokine moiety or immunocytokine at 37° C. in a C02 incubator for sufficient time (e.g., 24-48 hours), then the reporter can be detected, such as using microscopy or FACS for fluorescent protein, or to detect secreted embryonic alkaline phosphatase in cell culture medium using colorimetric enzyme assay for alkaline phosphatase activity (e.g., QUANTI-Blue™). Also see Examples 1, 4, 7, 9, 10, and 12 for exemplary methods.

[0274] Using IL-2 as an example, STAT5 and ERK1/2 signaling can be measured to reflect IL-2 moiety or immunocytokine bioactivity, for example, by measuring phosphorylation of STAT5 and ERK1/2 using any suitable method known in the art. For example, STAT5 and ERK1/2 phosphorylation can be measured using antibodies specific for the phosphorylated version of these molecules in combination with flow cytometry analysis. For example, freshly isolated PBMCs are incubated at 37° C. with IL-2 or variant thereof, or IL-2 immunocytokine. After incubation, cells are immediately fixed (e.g., with Cytofix buffer) to preserve the phosphorylation status and permeabilized (e.g., with Phosflow Perm buffer III). The cells are stained with fluorophore-labeled antibodies against phosphorylated STAT5 or ERK1/2, and analyzed by flow cytometry. Alternatively, test samples (e.g., IL-2 cytokine moieties or IL-2 immunocytokines described herein) can be injected i.p. into mice, then total splenocytes can be isolated, immediately fixed (e.g., Phosphoflow™ Lyse/Fix buffer), washed with ice cold PBS, stained using anti-CD4 and anti-CD25 antibodies, and then permeabilized (e.g., PhosFlow Perm Buffer III). Cells are then washed with ice-cold FACS buffer, stained with anti-FoxP3, washed with ice-cold FACS buffer, and stained with fluorophore-labeled anti-phospho-STAT5 at room temperature. Cells are washed with FACS buffer, then data can be acquired on a FACS cytometer and analyzed. PI 3-kinase signaling can be measured using any suitable method known in the art to reflect IL-2 bioactivity, too. For example, PI 3-kinase signaling can be measured using antibodies that are specific for phospho-S6 ribosomal protein in conjunction with flow cytometry analysis.

[0275] In some embodiments, the cytokine moieties or immunocytokines described herein is capable of activating an immune cell, such as inducing test cytokine (e.g., IL-2 moiety or IL-2 immunocytokine described herein) dependent immune cell (e.g., PBMC, NK cell, CD8+ T cell, Th17 cell) proliferation, differentiation, and/or activation, cytokine secretion, activating signaling transduction (e.g., inducing STAT5 phosphorylation, ERK1/2 phosphorylation, or stimulating PI 3-kinase signaling), and/or inducing immune cells to kill tumor cells or infected cells. In some embodiments, the cytokine moieties or immunocytokines described herein is capable of inhibiting an immune cell, such as inhibiting cytokine (e.g., pro-inflammatory cytokine) production, antigen presentation, or MHC molecule expression from the immune cell, or inhibiting or ameliorating signaling transduction. In some embodiments, the immune cell is selected from the group consisting of a monocyte, a dendritic cell, a macrophage, a B cell, a killer T cell (T_{c}, cytotoxic T lymphocyte, or CTL), a helper T cell (Th), a regulatory T cells (Treg), a γδ T cell, a natural killer T (NKT) cell, and a natural killer (NK) cell.

[0276] In some embodiments, the activity in activating/inhibiting an immune cell of the cytokine variant in a free state is the same or similar (such as within about ±20% difference) of that of a corresponding wildtype cytokine in a free state. In some embodiments, the cytokine variant comprises a mutation or a modification (e.g., post-translational modification), which reduces its activity in activating/inhibiting an immune cell compared to the wildtype cytokine (e.g., no more than about any of 80%, 70%, 60%, 50%, 40%, 30%, 20%, 10%, 9%, 8%, 7%, 6%, 5%, 4%, 3%, 2%, 1%, 0.9%, 0.8%, 0.7%, 0.6%, 0.5%, 0.4%, 0.3%, 0.2%, 0.10%, or 0% of the bioactivity of wildtype cytokine), when in a free state or in the absence of target antigen-antibody binding of the immunocytokine described herein. In some embodiments, in the presence of target antigen-antibody binding of the immunocytokine described herein, the activity in activating/inhibiting an immune cell of the cytokine variant is at least about 1% (such as at least about any of 2%, 3%, 4%, 5%, 6%, 7%, 8%, 9%, 10%, 20%, 30%, 40%, 50%, 60%, 70%, 80%, 90%, 100%, 110%, 120%, 130%, 140%, 150%, 160%, 170%, 180%, 190%, or 200%) of that of a corresponding wildtype cytokine.

### Antigen-Binding Protein, Antigen-Binding Polypeptide, Antibody, and Antigen-Binding Fragment

[0277] A “parental” antigen-binding protein described herein is an antigen-binding protein (e.g., antibody, antibody fragment, or ligand/receptor-hinge-Fc fusion protein) that can specifically recognize a target antigen and serve as backbone for constructing the immunocytokines described herein. In some embodiments, the antigen-binding protein (e.g., parental antigen-binding protein) comprises an antigen-binding polypeptide (e.g., antibody heavy chain, or antigen-binding fragment-hinge-Fc fusion polypeptide such as ligand/receptor-hinge-Fc fusion polypeptide) comprising from N′ to C′: an antigen-binding fragment (e.g., ligand, receptor, VHH, scFv, Fab, VG, or VL), an optional linker (such as any peptide linkers described herein), a hinge region, and an Fc domain subunit or portion thereof. In some embodiments, the antigen-binding protein (e.g., parental antigen-binding protein) comprises (e.g., consists essentially of, or consists of) homodimeric antigen-binding polypeptides, i.e., two identical antigen-binding polypeptides. For example, in some embodiments, the parental antigen-binding protein comprises (e.g., consists essentially of, or consists of) two antigen-binding polypeptides each comprising from N′ to C′: an antigen-binding fragment (e.g., a ligand (such as PD-L2) or portion thereof, a receptor (such as PD-1) or portion thereof, VHH, scFv, VG, or VL), an optional linker, a hinge region, and an Fc domain subunit or portion thereof. In some embodiments, the antigen-binding protein (e.g., parental antigen-binding protein) comprises (e.g., consists essentially of, or consists of) heterodimeric antigen-binding polypeptides, i.e., two antigen-binding polypeptides different in one or more of antigen-binding fragment (e.g., ligand, receptor, VHH, scFv, VG, or VL), optional linker, hinge region, and Fc domain subunit or portion thereof. For example, in some embodiments, the two antigen-binding polypeptides comprise different antigen-binding fragments (e.g., bind to the same target epitope or different target epitopes). In some embodiments, the two antigen-binding polypeptides comprise different hinge regions and/or different Fc domain subunits or portion thereof, e.g., for heterodimeric pairing purpose. For example, in some embodiments, one antigen-binding polypeptide comprises a hinge region comprising the sequence of SEQ ID NO: 41, and the pairing antigen-binding polypeptide comprises a hinge region comprising the sequence of SEQ ID NO: 42. In some embodiments, one antigen-binding polypeptide comprises a hinge region comprising the sequence of SEQ ID NO: 51, and the pairing antigen-binding polypeptide comprises a hinge region comprising the sequence of SEQ ID NO: 52. In some embodiments, one antigen-binding polypeptide comprises an Fc domain subunit comprising the sequence of SEQ ID NO: 61, and the pairing antigen-binding polypeptide comprises an Fc domain subunit comprising the sequence of SEQ ID NO: 62. In some embodiments, the parental antigen-binding protein (e.g., antibody such as full-length antibody, antigen-binding fragment-hinge-Fc fusion protein such as ligand/receptor-hinge-Fc fusion protein) comprises two or more antigen-binding fragments (e.g., ligand, receptor, VHH, scFv, Fab, VH, or VL). In some embodiments, one antigen-binding polypeptide comprises two or more antigen-binding fragments (e.g., two or more ligands and/or receptors fused in tandem). In some embodiments, the two or more antigen-binding fragments are the same. In some embodiments, the two or more antigen-binding fragments are different, e.g., one is Fab, the other is scFv; one is a ligand, the other is a receptor. In some embodiments, the parental antigen-binding protein (e.g., antibody such as full-length antibody, antigen-binding fragment-hinge-Fc fusion protein such as ligand/receptor-hinge-Fc fusion protein) or two or more antigen-binding fragments specifically recognize two or more target epitopes (on the same target antigen or different target antigens). In some embodiments, the parental antigen-binding protein or two or more antigen-binding fragments specifically recognize one target epitope. In some embodiments, the parental antigen-binding protein, antigen-binding polypeptide, or antigen-binding domain is monospecific and multivalent (e.g., bivalent). In some embodiments, the parental antigen-binding protein, antigen-binding polypeptide, or antigen-binding domain is multispecific (e.g., bispecific) and multivalent (e.g., bivalent). In some embodiments, the parental antigen-binding protein or antigen-binding domain is monospecific and monovalent, i.e., the cytokine moiety is positioned at the hinge region between an antigen-binding fragment (e.g., Fab, scFv, VHH, ligand, or receptor) and one subunit of the Fc domain (or portion thereof), and the other subunit of the Fc domain (or portion thereof) is not fused with another antigen-binding fragment; or the cytokine moiety is positioned at the hinge region between one antigen-binding fragment (e.g., Fab, scFv, VHH, ligand, or receptor) and a monomeric Fc subunit (or portion thereof).

[0278] It is to be understood that for the present invention, reference to an “antigen-binding protein,” “antigen-binding fragment-hinge-Fc fusion protein,” “ligand-hinge-Fc fusion protein,” or “receptor-hinge-Fc fusion protein” includes: i) an antigen-binding protein backbone (e.g., antibody such as full-length antibody), an antigen-binding fragment-hinge-Fc fusion protein backbone, or a ligand/receptor-hinge-Fc fusion protein backbone (see, e.g., FIGS. 2A-4C light grey portions); or ii) parental antigen-binding protein, parental antigen-binding fragment-hinge-Fc fusion protein, or parental ligand/receptor-hinge-Fc fusion protein whose hinge region has a cytokine moiety positioned therein (see, e.g., FIGS. 2A-4C). It is also to be understood that for the present invention, reference to an “antigen-binding fragment-hinge-Fc fusion polypeptide,” “ligand-hinge-Fc fusion polypeptide,” or “receptor-hinge-Fc fusion polypeptide” includes: i) an antigen-binding fragment-hinge-Fc fusion polypeptide backbone (e.g., antibody heavy chain) or ligand/receptor-hinge-Fc fusion polypeptide backbone (see, e.g., light grey portions of an Fc-containing polypeptide chain in FIGS. 2A-4C), or ii) parental antigen-binding fragment-hinge-Fc fusion polypeptide or ligand/receptor-hinge-Fc fusion polypeptide whose hinge region has a cytokine moiety positioned therein (see, e.g., the cytokine-Fc-containing polypeptide chain in FIGS. 2A-4C).

[0279] In some embodiments, the “parental” antigen-binding protein is an antigen-binding fragment-optional linker-hinge-Fc fusion protein comprising (e.g., consisting essentially of, or consisting of) two antigen-binding fragment-optional linker-hinge-Fc polypeptides. In some embodiments, the “parental” antigen-binding protein is a ligand or portion thereof-optional linker-hinge-Fc fusion protein comprising (e.g., consisting essentially of, or consisting of) two ligand or portion thereof-optional linker-hinge-Fc polypeptides (see FIGS. 4A-4C light grey portions). In some embodiments, the “parental” antigen-binding protein is a receptor or portion thereof-optional linker-hinge-Fc fusion protein comprising (e.g., consisting essentially of, or consisting of) two receptor or portion thereof-optional linker-hinge-Fc polypeptides. In some embodiments, the ligand or receptor portion thereof is extracellular domain of the ligand or receptor. In some embodiments, the parental antigen-binding protein is a PD-L2 extracellular domain-optional linker-hinge-Fc fusion protein. The one or more cytokine moieties (or cytokine subunits) are positioned at the hinge region of one or both of the parental antigen-binding fragment-hinge-Fc polypeptides (see, e.g., dark grey or pattern filled ovals in FIGS. 4A-4C). In some embodiments, the antigen-binding fragment can be any ligand or receptor (or portion thereof, such as extracellular domain) known in the art or derived from any suitable ligands or receptors, as long as binding of the cytokine moiety to its cytokine receptor is reduced in the absence of target antigen(s) binding of the antigen-binding fragment(s), for example, without target antigen (e.g., corresponding receptor or ligand) binding, reducing the activity (binding affinity to cytokine receptor and/or biological activity) of the cytokine or variant thereof positioned at the hinge region to be no more than about 70% of that of a corresponding cytokine or variant thereof in a free state. For example, the ligand or receptor can be selected from any ligand or receptor in below “Cell surface ligand or receptor” subsection.

[0280] In some embodiments, the antigen-binding protein is an antibody or antigen-binding fragments (e.g., antibody fragments, such as Fab, scFv, VHH etc.) thereof. A “parental” antibody or antigen-binding fragment described herein is an antibody or antigen-binding fragment that served as backbone for constructing the immunocytokine. In some embodiments, the parental antibody of the immunocytokine described herein is a full-length antibody. See, e.g., filled light grey portions in FIGS. 1A-2D. In some embodiments, the parental antibody of the immunocytokine described herein is an antigen-binding fragment. See, e.g., light grey portions in FIGS. 3A-3C. For example, in some embodiments, the parental antibody comprises two scFvs each fused at the N-terminus of a subunit of an Fc domain via a hinge or portion thereof (see FIG. 3A light grey portions). In some embodiments, the parental antibody comprises two scFvs each fused at the N-terminus of a subunit of an Fc domain portion (e.g., CH2) via a hinge or portion thereof. In some embodiments, the parental antibody comprises two Fabs each fused at the N-terminus of a subunit of an Fc domain portion (e.g., CH2) via a hinge or portion thereof. In some embodiments, the parental antibody comprises one scFv fused at the N-terminus of one subunit of an Fc domain via a hinge or portion thereof, and one Fab fused at the N-terminus of the other subunit of the Fc domain via a hinge or portion thereof (see FIGS. 3B-3C light grey portions). In some embodiments, the parental antibody comprises one scFv fused at the N-terminus of one subunit of an Fc domain portion (e.g., CH2) via a hinge or portion thereof, and one Fab fused at the N-terminus of the other subunit of the Fc domain portion (e.g., CH2) via a hinge or portion thereof. In some embodiments, the parental antibody comprises a first VHH fused at the N-terminus of one subunit of an Fc domain or portion thereof via a hinge or portion thereof, and a second VHH fused at the N-terminus of the other subunit of the Fc domain or portion thereof via a hinge or portion thereof (see FIGS. 4A-4C light grey portions and replace “ligand” or “receptor” with VHH). The one or more cytokine moieties (or cytokine subunits) are positioned at the hinge region of any of the parental antibody (e.g., full-length antibody) or antigen-binding fragment (see, e.g., dark grey or pattern filled ovals in FIGS. 2A-4C).

[0281] The antigen-binding fragment can be of any format known in the art or derived from any suitable antibodies, as long as binding of the cytokine moiety to its cytokine receptor is reduced in the absence of target antigen(s) binding of the antigen-binding fragment(s), for example, without target antigen binding, reducing the activity (binding affinity to cytokine receptor and/or biological activity) of the cytokine or variant thereof positioned at the hinge region to be no more than about 70% of that of a corresponding cytokine or variant thereof in a free state. For example, the antigen-binding fragment can be selected from an scFv, a VH, a VL, an scFv-scFv, an Fv, a Fab, a Fab′, a (Fab′)2, a minibody, a diabody, a domain antibody variant (dAb), a single domain antibody (sdAb) such as a camelid antibody (VHH) or a VNAR, a fibronectin 3 domain variant, an ankyrin repeat variant, and other antigen-specific binding domains derived from other protein scaffolds. In some embodiments, the antigen-binding fragment is an scFv. In some embodiments, the antigen-binding fragment is a Fab. In some embodiments, the antigen-binding fragment is formed by a VH from a first polypeptide chain and a VL from a second polypeptide chain. In some embodiments, the antigen-binding fragment is human. In some embodiments, the antigen-binding fragment is humanized. In some embodiments, the antigen-binding fragment is chimeric. In some embodiments, the antigen-binding fragment is derived from a monoclonal antibody of mouse, rat, monkey, or rabbit, etc.

[0282] In some embodiments, two or more antigen-binding fragments are connected in tandem via optional linker(s). For example, in some embodiments, the immunocytokine comprises from N′ to C′: Fab1—optional linker1—Fab2—optional linker2—(optional hinge or portion thereof-cytokine moiety—optional hinge or portion thereof)—Fc subunit. For example, CH1 or CL of Fab1 is linked to VH or VL of Fab2 via the optional linker 1. In some embodiments, the immunocytokine comprises from N′ to C′: scFv1 (or sdAb1)—optional linker1—scFv2 (or sdAb2)—optional linker 2—(optional hinge or portion thereof—cytokine moiety—optional hinge or portion thereof)—Fc subunit. In some embodiments, the immunocytokine comprises from N′ to C′: ligand1—optional linker1—ligand2—optional linker 2—(optional hinge or portion thereof-cytokine moiety—optional hinge or portion thereof)—Fc subunit. The cytokine moiety in parenthesis can be absent for the other pairing immunocytokine chain. For example, the immunocytokine can comprise a first polypeptide chain comprising from N′ to C′: scFv1 (or sdAb1)—optional linker1—scFv2 (or sdAb2)—optional linker2—cytokine moiety—hinge or portion thereof—Fc subunit1; and a second polypeptide chain from N′ to C′: scFv3 (or sdAb3)-optional linker3—scFv4 (or sdAb4)—optional linker4—hinge or portion thereof—Fc subunit2.

[0283] Binding affinity of an antigen-binding protein (e.g., antibody or ligand/receptor-hinge-Fc fusion protein) or antigen-binding fragment (e.g., scFv, Fab, VHH, ligand, or receptor) and its target antigen can be determined experimentally by any suitable antibody/antigen binding assays or other protein binding assays (e.g., ligand-receptor binding) known in the art, e.g., Western blots, ELISA, MSD electrochemiluminescence, bead based MIA, RIA, SPR, ECL, IRMA, EIA, Biacore assay, Octet analysis, peptide scans, FACS, etc. Also see “binding affinity” subsection above for exemplary methods. In some embodiments, the Kd of the binding between the antibody or antigen-binding fragment and its target antigen is about any of ≤10⁻⁵ M, ≤10⁻⁶ M, ≤10⁻⁷ M, ≤10⁻¹ M, ≤10⁻⁹ M, ≤10¹⁰ M, ≤10⁻¹¹ M, or 10⁻⁵ M.

[0284] Amino acid sequence variants of an antigen-binding protein (e.g., antibody or ligand/receptor-hinge-Fc fusion protein) or antigen-binding fragment may be prepared by introducing appropriate modifications into the nucleic acid sequence encoding the antigen-binding protein or antigen-binding fragment, or by peptide synthesis. Such modifications include, for example, deletions from, and/or insertions into and/or substitutions of residues within the amino acid sequences of the antibody or antigen-binding fragment. Any combination of deletion, insertion, and substitution can be made to arrive at the final construct, provided that the final construct possesses the desired characteristics, e.g., antigen-binding.

[0285] In some embodiments, the antigen-binding protein (e.g., antibody or ligand/receptor-hinge-Fc fusion protein) or antigen-binding fragment (e.g., scFv, Fab, VHH, ligand, or receptor) has one or more amino acid substitutions. Sites of interest for substitutional mutagenesis include the HVRs (or CDRs) and FRs of antibodies or antigen-binding fragments. Conservative substitutions are shown in Table B under the heading of “Preferred substitutions.” More substantial changes are provided in Table B under the heading of “exemplary substitutions,” and as further described below in reference to amino acid side chain classes. Amino acid substitutions may be introduced into an antigen-binding fragment of interest and the products screened for a desired activity, e.g., retained/improved antigen binding, decreased immunogenicity.

TABLE B
Amino acid substitutions

| Original | | Preferred |
|---|---|---|
| Residue | Exemplary Substitutions | Substitutions |
| Ala (A) | Val; Leu; Ile | Val |
| Arg (R) | Lys; Gln; Asn | Lys |
| Asn (N) | Gln; His; Asp, Lys; Arg | Gln |
| Asp (D) | Glu; Asn | Glu |
| Cys (C) | Ser; Ala | Ser |
| Gln (Q) | Asn; Glu | Asn |
| Glu (E) | Asp; Gln | Asp |
| Gly (G) | Ala | Ala |
| His (H) | Asn; Gln; Lys; Arg | Arg |
| Ile (I) | Leu; Val; Met; Ala; Phe; Norleucine | Leu |
| Leu (L) | Norleucine; Ile; Val; Met; Ala; Phe | Ile |
| Lys (K) | Arg; Gln; Asn | Arg |
| Met (M) | Leu; Phe; Ile | Leu |
| Phe (F) | Trp; Leu; Val; Ile; Ala; Tyr | Tyr |
| Pro (P) | Ala | Ala |
| Ser (S) | Thr | Thr |
| Thr (T) | Val; Ser | Ser |
| Trp (W) | Tyr; Phe | Tyr |
| Tyr (Y) | Trp; Phe; Thr; Ser | Phe |
| Val (V) | Ile; Leu; Met; Phe; Ala; Norleucine | Leu |

[0286] Amino acids may be grouped according to common side-chain properties: (1) hydrophobic: Norleucine, Met, Ala, Val, Leu, Ile; (2) neutral hydrophilic: Cys, Ser, Thr, Asn, Gln; (3) acidic: Asp, Glu; (4) basic: His, Lys, Arg; (5) residues that influence chain orientation: Gly, Pro; and (6) aromatic: Trp, Tyr, Phe. Non-conservative substitutions will entail exchanging a member of one of these classes for another class.

[0287] One type of substitutional variant involves substituting one or more HVR residues of a parent antibody. Generally, the resulting variant(s) selected for further study will have modifications (e.g., improvements) in certain biological properties (e.g., increased affinity, reduced immunogenicity) relative to the parent antibody and/or will have substantially retained certain biological properties of the parent antibody. An exemplary substitutional variant is an affinity-matured antibody, which may be conveniently generated, e.g., using phage display-based affinity maturation techniques such as those described herein. Briefly, one or more HVR residues are mutated and the variant antibodies displayed on phage and screened for a particular biological activity (e.g., binding affinity).

[0288] In some embodiments, substitutions, insertions, or deletions may occur within one or more HVRs so long as such alterations do not substantially reduce the ability of the antibody or antigen-binding domain to bind antigen. For example, conservative alterations (e.g., conservative substitutions as provided herein) that do not substantially reduce binding affinity may be made in HVRs. Such alterations may be outside of HVR “hotspots” or CDRs.

[0289] Alterations (e.g., substitutions) may be made in HVRs, e.g., to improve antibody affinity. Such alterations may be made in HVR “hotspots,” i.e., residues encoded by codons that undergo mutation at high frequency during the somatic maturation process (see, e.g., Chowdhury, Methods Mol. Biol. 207:179-196 (2008)), and/or SDRs (a-CDRs), with the resulting variant VH or VL being tested for binding affinity. Affinity maturation by constructing and reselecting from secondary libraries has been described, e.g., in Hoogenboom et al. in Methods in Molecular Biology 178:1-37 (O'Brien et al., ed., Human Press, Totowa, NJ, (2001)). In some embodiments of affinity maturation, diversity is introduced into the variable genes chosen for maturation by any of a variety of methods (e.g., error-prone PCR, chain shuffling, or oligonucleotide-directed mutagenesis). A secondary library is then created. The library is then screened to identify any antibody variants with the desired affinity. Another method to introduce diversity involves HVR-directed approaches, in which several HVR residues (e.g., 4-6 residues at a time) are randomized. HVR residues involved in antigen binding may be specifically identified, e.g., using alanine scanning mutagenesis or modeling. CDR-H3 and CDR-L3 in particular are often targeted.

[0290] A useful method for identification of residues or regions of an antibody that may be targeted for mutagenesis is called “alanine scanning mutagenesis” as described by Cunningham and Wells (1989) Science, 244:1081-1085. In this method, a residue or group of target residues (e.g., charged residues such as Arg, Asp, His, Lys, and Glu) are identified and replaced by a neutral or negatively charged amino acid (e.g., alanine or polyalanine) to determine whether the interaction of the antibody with antigen is affected. Further substitutions may be introduced at the amino acid locations demonstrating functional sensitivity to the initial substitutions. Alternatively, or additionally, a crystal structure of an antigen-antibody complex to identify contact points between the antibody and antigen. Such contact residues and neighboring residues may be targeted or eliminated as candidates for substitution. Variants may be screened to determine whether they contain the desired properties.

### Target Antigens

[0291] In some embodiments, the immunocytokine described herein comprises an antigen-binding protein specifically recognizing a target antigen. In some embodiments, the antigen-binding protein comprises an antigen-binding polypeptide comprising from N′ to C′: an antigen-binding fragment (e.g., ligand, receptor, VHH, scFv, or Fab), a hinge region, and an Fc domain subunit or portion thereof “Target antigen” or “target epitope” used herein can refer to any protein or polypeptide that can be specifically recognized by the antigen-binding protein, antigen-binding polypeptide, or antigen-binding fragment described herein, such as tumor antigen or epitope, pathogen antigen or epitope, antigen or epitope involved in autoimmune diseases, allergy, and/or graft rejection, ligand or receptor or portion thereof (e.g., extracellular domain of a ligand/receptor), immune cell surface antigen or epitope, etc. In some embodiments, the antigen-binding protein is monovalent and monospecific. In some embodiments, the antigen-binding protein is multivalent (e.g., bivalent) and monospecific. In some embodiments, the antigen-binding protein is multivalent (e.g., bivalent) and multispecific (e.g., bispecific). The valency and specificity of the antigen-binding protein herein is referring to valency and specificity of the antigen-binding fragment(s) (e.g., ligand, receptor, VHH, scFv, or Fab) of the immunocytokine, not including valency or specificity of the cytokine or variant thereof.

[0292] In some embodiments, the antigen-binding fragment is a ligand (e.g., CD155, PD-L1 or PD-L2 extracellular domain) that specifically recognizes a cell surface receptor (e.g., PD-1). In some embodiments, the antigen-binding fragment is a receptor (e.g., TIGIT or PD-1 extracellular domain) that specifically recognizes a ligand (e.g., CD155, PD-L1 or PD-L2). In some embodiments, the antigen-binding protein comprises two or more (such as 2) antigen-binding polypeptides each comprising from N′ to C′: an antigen-binding fragment, a hinge region, and an Fc domain subunit or portion thereof. In some embodiments, the antigen-binding polypeptide comprises from N′ to C′: two or more antigen-binding fragments (e.g., ligand or receptor), e.g., fused in tandem, a hinge region, and an Fc domain subunit or portion thereof. The two or more antigen-binding fragments can be the same or different, can specifically recognize the same target epitope or different target epitopes (on the same target antigen or different target antigens). For example, in some embodiments, one antigen-binding fragment is derived from a first ligand (e.g., extracellular domain of first ligand) that specifically recognizes a first receptor or epitope thereof (e.g., extracellular domain of first receptor), another antigen-binding fragment is derived from a second receptor (e.g., extracellular domain of second receptor) that specifically recognizes a second ligand or epitope thereof (e.g., extracellular domain of second ligand). In some embodiments, one antigen-binding fragment is derived from a first ligand (e.g., extracellular domain of first ligand) that specifically recognizes a first receptor or epitope thereof (e.g., extracellular domain of first receptor), another antigen-binding fragment is derived from a second ligand (e.g., extracellular domain of second ligand) that specifically recognizes a second receptor or epitope thereof (e.g., extracellular domain of second receptor). The first and second receptors (or epitopes thereof) can be the same or different. The first and second ligands (or epitopes thereof) can be the same or different. In some embodiments, the first and second antigen-binding fragments (ligand or receptor) specifically recognize the same epitope of a target antigen (corresponding receptor or ligand, respectively), i.e., the immunocytokine is bivalent and monospecific. In some embodiments, the first and second antigen-binding fragments (ligand or receptor) specifically recognize different epitopes of the same target antigen (corresponding receptor or ligand, respectively), i.e., the immunocytokine is bivalent and bispecific. In some embodiments, the first and second antigen-binding fragments (ligand or receptor) specifically recognize different target antigens (e.g., different epitopes of different target antigens, such as corresponding receptor or ligand, respectively), i.e., the immunocytokine is bivalent and bispecific.

[0293] In some embodiments, the antigen-binding protein is an antibody or portion thereof. Thus in some embodiments, the immunocytokine described herein comprises an antibody (e.g., full-length antibody, heavy chain only antibody, or antigen-binding fragment fused to an Fc domain subunit or portion thereof) specifically recognizing a target antigen. In some embodiments, the antibody comprises two or more antigen-binding fragments (e.g., VHH, scFv, or Fab). The two antigen-binding domains (Fabs) of the full-length antibody, or the two or more antigen-binding fragments (e.g., VHH, scFv, or Fab) of the antibody, can be the same or different, can specifically recognize the same target epitope or different target epitopes (on the same target antigen or different target antigens). In some embodiments, the immunocytokine described herein comprises one or more antigen-binding domains (e.g., scFv or Fab) that specifically recognize one or more target epitopes (can be the same or different, can be on the same target antigen or different target antigens). In some embodiments, the immunocytokine comprises a first antigen-binding domain (e.g., VHH, scFv, or Fab) specifically recognizing a first target epitope, and a second antigen-binding domain (e.g., VHH, scFv, or Fab) specifically recognizing a second target epitope. In some embodiments, the first and the second target epitopes are the same. In some embodiments, the first and the second target epitopes are different (e.g., different epitopes on the same target antigen, or different epitopes of different target antigens). In some embodiments, the first and second antigen-binding domains specifically recognize the same epitope of a target antigen, i.e., the immunocytokine is bivalent and monospecific. In some embodiments, the first and second antigen-binding domains specifically recognize different epitopes of the same target antigen, i.e., the immunocytokine is bivalent and bispecific. In some embodiments, the first and second antigen-binding domains specifically recognize different target antigens (e.g., different epitopes of different target antigens), i.e., the immunocytokine is bivalent and bispecific. In some embodiments, the first target antigen is an immune cell surface antigen, and the second target antigen is a tumor antigen.

[0294] In some embodiments, the target antigen is a cell surface molecule (e.g., extracellular domain of a receptor/ligand). In some embodiments, the target antigen acts as a cell surface marker on a target cell (e.g., tumor cell, immune cell) associated with a special disease state. The target antigens (e.g., tumor antigen, extracellular domain of a receptor/ligand) specifically recognized by the antigen-binding domain may be antigens on a single diseased cell or antigens that are expressed on different cells that each contribute to the disease. The target antigens specifically recognized by the antigen-binding domain(s) may be directly or indirectly involved in the diseases.

[0295] Tumor Antigen

[0296] In some embodiments, the target antigen or epitope is a tumor antigen or epitope.

[0297] Tumor antigens are proteins that are produced by tumor cells that can elicit an immune response, particularly T cell mediated immune responses. The selection of the targeted antigen of the invention will depend on the particular type of cancer to be treated. Exemplary tumor antigens include, for example, a glioma-associated antigen, BCMA (B-cell maturation antigen), carcinoembryonic antigen (CEA), β-human chorionic gonadotropin, alpha-fetoprotein (AFP), lectin-reactive AFP, thyroglobulin, RAGE-1, MN-CAIX, human telomerase reverse transcriptase, RU1, RU2 (AS), intestinal carboxyl esterase, mut hsp70-2, M-CSF, prostase, prostate-specific antigen (PSA), PAP, NY-ESO-1, LAGE-1a, p53, prostein, PSMA, HER2/neu, survivin and telomerase, prostate-carcinoma tumor antigen-1 (PCTA-1), MAGE, ELF2M, neutrophil elastase, ephrinB2, CD22, insulin growth factor (IGF)-1, IGF-II, IGF-I receptor, and mesothelin. In some embodiments, the tumor antigen comprises one or more antigenic cancer epitopes associated with a malignant tumor. Malignant tumors express a number of proteins that can serve as target antigens for an immune attack. These molecules include but are not limited to tissue-specific antigens such as MART-1, tyrosinase and gp100 in melanoma and prostatic acid phosphatase (PAP) and prostate-specific antigen (PSA) in prostate cancer. Other target molecules belong to the group of transformation-related molecules such as the oncogene HER2/Neu/ErbB-2. Yet another group of target antigens is onco-fetal antigens such as carcinoembryonic antigen (CEA). In B-cell lymphoma, the tumor-specific idiotype immunoglobulin constitutes a truly tumor-specific immunoglobulin antigen that is unique to the individual tumor. B-cell differentiation antigens such as CD19, CD20 and CD37 are other candidates for target antigens in B-cell lymphoma.

[0298] In some embodiments, the tumor antigen is a tumor-specific antigen (TSA) or a tumor-associated antigen (TAA). A TSA is unique to tumor cells and does not occur on other cells in the body. A TAA is not unique to a tumor cell, and instead is also expressed on a normal cell under conditions that fail to induce a state of immunologic tolerance to the antigen. The expression of the antigen on the tumor may occur under conditions that enable the immune system to respond to the antigen. TAAs may be antigens that are expressed on normal cells during fetal development, when the immune system is immature, and unable to respond or they may be antigens that are normally present at extremely low levels on normal cells, but which are expressed at much higher levels on tumor cells. Non-limiting examples of TSA or TAA antigens include the following: differentiation antigens such as MART-1/MelanA (MART-I), gp 100 (Pmel 17), tyrosinase, TRP-1, TRP-2 and tumor-specific multilineage antigens such as MAGE-1, MAGE-3, BAGE, GAGE-1, GAGE-2, p15; overexpressed embryonic antigens such as CEA; overexpressed oncogenes and mutated tumor-suppressor genes such as p53, Ras, HER2/neu; unique tumor antigens resulting from chromosomal translocations; such as BCR-ABL, E2A-PRL, H4-RET, IGH-IGK, MYL-RAR; and viral antigens, such as the Epstein Barr virus antigens EBVA and the human papillomavirus (HPV) antigens E6 and E7. Other large, protein-based antigens include TSP-180, MAGE-4, MAGE-5, MAGE-6, RAGE, NY-ESO, p185erbB2, p180erbB-3, c-met, nm-23HI, PSA, TAG-72, CA 19-9, CA 72-4, CAM 17.1, NuMa, K-ras, beta-Catenin, CDK4, Mum-1, p 15, p 16, 43-9F, 5T4 (TPBG), 791Tgp72, alpha-fetoprotein, beta-HCG, BCA225, BTAA, CA 125, CA 15-3\CA 27.29\BCAA, CA 195, CA 242, CA-50, CAM43, CD68\P1, CO-029, FGF-5, G250, Ga733\EpCAM, HTgp-175, M344, MA-50, MG7-Ag, MOV18, NB/70K, NY-CO-1, RCAS 1, SDCCAG16, TA-90\Mac-2 binding protein\cyclophilin C-associated protein, TAAL6, TAG72, TLP, and TPS.

[0299] In some embodiments, the tumor antigen is selected from the group consisting of FIXa, FX, DLL3, DLL4, Ang-2, Nectin-4, FOLRa, GPNMB, CD56 (NCAM), TACSTD2 (TROP-2), tissue factor, ENPP3, P-cadherin, STEAPI, CEACAM5, Mucin 1 (Sialoglycotope CA6), Guanylyl cyclase C (GCC), SLC44A4, LIV1 (ZIP6), NaPi2b, SLITRK6, SC-16, fibronectin, extra-domain B (EDB), Endothelium receptor ETB, ROBO4, Collagen IV, Periostin, Tenascin c, CD74, CD98, Mesothelin, TSHR, CD19, CD123, CD22, CD30, CD171, CS-1, CLL-1, CD33, EGFRvIII, GD2, GD3, BCMA, Tn Ag, prostate specific membrane antigen (PSMA), RORI, FLT3, FAP, TAG72, CD38, CD44v6, CEA, EPCAM, B7H3, KIT, IL-13Ra2, interleukin-11 receptor a (IL-11Ra), PSCA, PRSS21, VEGFR2 (CD309), LewisY, CD24, platelet-derived growth factor receptor-beta (PDGFR-beta), SSEA-4, CD20, Folate receptor alpha, ERBB2 (HER2/neu), MUC1, epidermal growth factor receptor (EGFR), NCAM, Prostase, PAP, ELF2M, Ephrin B2, IGF-I receptor, CAIX, LMP2, gp100, bcr-abl, tyrosinase, EphA2, Fucosyl GM1, sLe, GM3, TGS5, HMWMAA, o-acetyl-GD2, Folate receptor beta, TEM1/CD248, TEM7R, CLDN6, CLDN18.2, GPRC5D, CXORF61, CD97, CD179a, ALK, Polysialic acid, PLAC1, GloboH, NY-BR-1, UPK2, HAVCR1, ADRB3, PANX3, GPR20, LY6K, OR51E2, TARP, WTi, NY-ESO-1, LAGE-1a, MAGE-A1, legumain, HPV E6,E7, MAGE A1, ETV6-AML, sperm protein 17, XAGE1, Tie 2, MAD-CT-1, MAD-CT-2, Fos-related antigen 1, p53, p53 mutant, prostein, survivin and telomerase, PCTA-1/Galectin 8, MelanA/MART1, Ras mutant, hTERT, sarcoma translocation breakpoints, ML-IAP, ERG (TMPRSS2 ETS fusion gene), NA17, PAX3, Androgen receptor, Cyclin B1, MYCN, RhoC, TRP-2, CYPIBI, BORIS, SART3, PAX5, OY-TESI, LCK, AKAP-4, SSX2, RAGE-1, human telomerase reverse transcriptase, RU1, RU2, intestinal carboxyl esterase, mut hsp70-2, CD79a, CD79b, CD72, LAIRi, FCAR, LILRA2, CD300LF, CLEC12A, BST2, EMR2, LY75, GPC3, FCRL5, and IGLL1. In some embodiments, the tumor antigen is selected from the group consisting of BCMA, EphA2, HER2, GD2, Glypican-3, 5T4, 8H9, Wv06 integrin, B7-H3, B7-H6, CAIX, CA9, CD19, CD20, CD22, CD30, CD33, CD38, CD44, CD44v6, CD44v7/8, CD70 (TNFSF7), CD123, CD138, CD171, CEA, CSPG4, EGFR, EGFRvIII, EGP2, EGP40, EpCAM, ERBB3, ERBB4, ErbB3/4, FAP, FAR, FBP, fetal AchR, Folate Receptor a, GD2, GD3, HLA-A1 MAGE A1, HLA-A2, IL11Ra, IL13Ra2, KDR, Lewis-Y, MCSP, Mesothelin, Muci, Muc16, NCAM, NKG2D ligands, NY-ESO-I, PRAME, PSCA, PSCI, PSMA, RORI, SURVIVIN, TAG72, TEM1, TEM8, VEGFR2, carcinoembryonic antigen, and HMW-MAA. Also see exemplary tumor antigens described in Shim H. (Biomolecules. 2020 March; 10(3): 360), and Diamantis N. and Banerji U. Br J Cancer. 2016; 114(4): 362-367, the contents of which are incorporated herein by reference in their entirety.

[0300] In some embodiments, the tumor antigen is HER2. In some embodiments, the antibody or antigen-binding domain specifically recognizing HER2 is derived from trastuzumab (e.g., Herceptin®), pertuzumab (e.g., Perjeta®), margetuximab, or 7C2. In some embodiments, the antibody or antigen-binding domain specifically recognizing HER2 comprises heavy chain CDRs, light chain CDRs, or all 6 CDRs of any of trastuzumab, pertuzumab, margetuximab, or 7C2. In some embodiments, the antibody or antigen-binding domain specifically recognizing HER2 comprises VH and/or VL of trastuzumab, pertuzumab, margetuximab, or 7C2. In some embodiments, the immunocytokine comprises a parental anti-HER2 antibody (e.g., full-length antibody). In some embodiments, anti-HER2 antibody or antigen binding fragment thereof comprises: i) a VH-CDR1 comprising the sequence of SEQ ID NO: 188; ii) a VH-CDR2 comprising the sequence of SEQ ID NO: 189; iii) a VH-CDR3 comprising the sequence of SEQ ID NO: 190; iv) a VL-CDR1 comprising the sequence of SEQ ID NO: 191; v) a VL-CDR2 comprising the sequence of SEQ ID NO: 192; and vi) a VL-CDR3 comprising the sequence of SEQ ID NO: 193. In some embodiments, the anti-HER2 antibody or antigen binding fragment thereof comprises a VH comprising the sequence of SEQ ID NO: 150 and a VL comprising the sequence of SEQ ID NO: 151. In some embodiments, the anti-HER2 antibody (e.g., parental full-length antibody) comprises two heavy chains each comprising the sequence of SEQ ID NO: 152 or 153, and two light chains each comprising the sequence of SEQ ID NO: 154. In some embodiments, the anti-HER2 antibody (e.g., parental antibody) is a homodimeric full-length antibody (i.e., comprising two identical heavy chains and two identical light chains). In some embodiments, the anti-HER2 antibody (e.g., parental antibody) is a heterodimeric full-length antibody, e.g., KIH antibody, for example, one heavy chain comprises an Fc domain subunit comprising the sequence of SEQ ID NO: 61 and the other heavy chain comprises an Fc domain subunit comprising the sequence of SEQ ID NO: 62.

[0301] Pathogen Antigen

[0302] In some embodiments, the target antigen or epitope is a pathogen antigen or epitope, such as a fungal, viral, bacterial, protozoal or other parasitic antigen or epitope.

[0303] In some embodiments, the fungal antigen is from Aspergillus or Candida. Fungal antigens for use with compositions and methods of the invention include, but are not limited to, e.g., candida fungal antigen components; aspergillus fungal antigens; histoplasma fungal antigens such as heat shock protein 60 (HSP60) and other histoplasma fungal antigen components; cryptococcal fungal antigens such as capsular polysaccharides and other cryptococcal fungal antigen components; coccidiodes fungal antigens such as spherule antigens and other coccidiodes fungal antigen components; and tinea fungal antigens such as trichophytin and other coccidiodes fungal antigen components.

[0304] Bacterial antigens for use with the immunocytokine disclosed herein include, but are not limited to, e.g., bacterial antigens such as pertussis toxin, filamentous hemagglutinin, pertactin, FIM2, FIM3, adenylate cyclase and other pertussis bacterial antigen components; diphtheria bacterial antigens such as diphtheria toxin or toxoid and other diphtheria bacterial antigen components; tetanus bacterial antigens such as tetanus toxin or toxoid and other tetanus bacterial antigen components; streptococcal bacterial antigens such as M proteins and other streptococcal bacterial antigen components; gram-negative bacilli bacterial antigens such as lipopolysaccharides and other gram-negative bacterial antigen components, Mycobacterium tuberculosis bacterial antigens such as mycolic acid, heat shock protein 65 (HSP65), the 30 kDa major secreted protein, antigen 85A and other mycobacterial antigen components; Helicobacter pylori bacterial antigen components; pneumococcal bacterial antigens such as pneumolysin, pneumococcal capsular polysaccharides and other pneumococcal bacterial antigen components; haemophilus influenza bacterial antigens such as capsular polysaccharides and other haemophilus influenza bacterial antigen components; anthrax bacterial antigens such as anthrax protective antigen and other anthrax bacterial antigen components; rickettsiae bacterial antigens such as rompA and other rickettsiae bacterial antigen component. Also included with the bacterial antigens described herein are any other bacterial, mycobacterial, mycoplasmal, rickettsial, or chlamydial antigens. Partial or whole pathogens may also be: haemophilus influenza; Plasmodium falciparum; Neisseria meningitidis; Streptococcus pneumoniae; Neisseria gonorrhoeae; salmonella serotype typhi; shigella; Vibrio cholerae; Dengue Fever; Encephalitides; Japanese Encephalitis; lyme disease; Yersinia pestis; west nile virus; yellow fever; tularemia; hepatitis (viral; bacterial); RSV (respiratory syncytial virus); HPIV 1 and HPIV 3; adenovirus; smallpox; allergies and cancers.

[0305] Examples of protozoal and other parasitic antigens include, but are not limited to, e.g., Plasmodium falciparum antigens such as merozoite surface antigens, sporozoite surface antigens, circumsporozoite antigens, gametocyte/gamete surface antigens, blood-stage antigen pf 155/RESA and other plasmodial antigen components; toxoplasma antigens such as SAG-1, p30 and other toxoplasmal antigen components; schistosomae antigens such as glutathione-S-transferase, paramyosin, and other schistosomal antigen components; Leishmania major and other leishmaniae antigens such as gp63, lipophosphoglycan and its associated protein and other leishmanial antigen components; and Trypanosoma cruzi antigens such as the 75-77 kDa antigen, the 56 kDa antigen and other trypanosomal antigen components.

[0306] In some embodiments, the viral antigen is from Herpes simplex virus (HSV), respiratory syncytial virus (RSV), metapneumovirus (hMPV), rhinovirus, parainfluenza (PIV), Epstein-Barr virus (EBV), Cytomegalovirus (CMV), JC virus (John Cunningham virus), BK virus, HIV, Zika virus, human coronavirus, norovirus, encephalitis virus, or Ebola. In some embodiments, the virus is an Orthomyxoviridae virus selected from the group consisting of Influenza A virus, Influenza B virus, Influenza C virus, and any subtype or reassortant thereof. In some embodiments, the virus is an Influenza A virus or any subtype or reassortant thereof, such as Influenza A virus subtype H1N1 (H1N1) or Influenza A virus subtype H5N1 (H5N1). In some embodiments, the virus is a Coronaviridae virus selected from the group consisting of alpha coronaviruses 229E (HCoV-229E), New Haven coronavirus NL63 (HCoV-NL63), beta coronaviruses OC43 (HCoV-OC43), coronavirus HKU1 (HCoV-HKU1), Severe Acute Respiratory Syndrome coronavirus (SARS-CoV), Middle East Respiratory Syndrome coronavirus (MERS-CoV), and Severe Acute Respiratory Syndrome Coronavirus 2 (SARS-CoV-2). In some embodiments, the virus is SARS-CoV, MERS-CoV, or SARS-CoV-2. In some embodiments, the virus is a Filoviridae virus selected from Ebola virus (EBOV) and Marburg virus (MARV). In some embodiments, the virus is a Flaviviridae virus selected from the group consisting of Zika virus (ZIKV), West Nile virus (WNV), Dengue virus (DENV), and Yellow Fever virus (YFV).

[0307] Antigens Involved in Autoimmune Diseases, Allergy, and Graft Rejection

[0308] In some embodiments, the target antigen or epitope is an antigen or epitope involved in autoimmune diseases, allergy, and/or graft rejection. For example, an antigen involved in any one or more of the following autoimmune diseases or disorders can be used in the present invention: diabetes, diabetes mellitus, arthritis (including rheumatoid arthritis, juvenile rheumatoid arthritis, osteoarthritis, psoriatic arthritis), multiple sclerosis, myasthenia gravis, systemic lupus erythematosis, autoimmune thyroiditis, dermatitis (including atopic dermatitis and eczematous dermatitis), psoriasis, Sjogren's Syndrome, including keratoconjunctivitis sicca secondary to Sjogren's Syndrome, alopecia greata, allergic responses due to arthropod bite reactions, Crohn's disease, aphthous ulcer, iritis, conjunctivitis, keratoconjunctivitis, ulcerative colitis, asthma, allergic asthma, cutaneous lupus erythematosus, scleroderma, vaginitis, proctitis, drug eruptions, leprosy reversal reactions, erythema nodosum leprosum, autoimmune uveitis, allergic encephalomyelitis, acute necrotizing hemorrhagic encephalopathy, idiopathic bilateral progressive sensorineural hearing loss, aplastic anemia, pure red cell anemia, idiopathic thrombocytopenia, polychondritis, Wegener's granulomatosis, chronic active hepatitis, Stevens-Johnson syndrome, idiopathic sprue, lichen planus, Crohn's disease, inflammatory bowel disease (IBD), Graves ophthalmopathy, sarcoidosis, primary biliary cirrhosis, uveitis posterior, and interstitial lung fibrosis. Examples of antigens involved in autoimmune disease include glutamic acid decarboxylase 65 (GAD 65), native DNA, myelin basic protein, myelin proteolipid protein, acetylcholine receptor components, thyroglobulin, and the thyroid stimulating hormone (TSH) receptor. Examples of antigens involved in allergy include pollen antigens such as Japanese cedar pollen antigens, ragweed pollen antigens, rye grass pollen antigens, animal derived antigens such as dust mite antigens and feline antigens, histocompatibility antigens, and penicillin and other therapeutic drugs. Examples of antigens involved in graft rejection include antigenic components of the graft to be transplanted into the graft recipient such as heart, lung, liver, pancreas, kidney, and neural graft components. The antigen may be an altered peptide ligand useful in treating an autoimmune disease. In some embodiments, the target antigen is CD3, CD4, CD123, or CD8.

[0309] Immune Checkpoint Molecule

[0310] In some embodiments, the target antigen or epitope is an immune checkpoint molecule. Immune checkpoints are regulators of the immune system.

[0311] In some embodiments, the immune checkpoint molecule is a stimulatory immune checkpoint molecule. In some embodiments, the stimulatory immune checkpoint molecule is selected from the group consisting of CD27, CD28, OX40, ICOS, GITR, 4-1BB, CD27, CD40, CD3, and HVEM. Thus, in some embodiments, the antigen-binding protein (e.g., antibody, antigen-binding domain, or ligand/receptor-Fc fusion protein) described herein is an activator of a stimulatory immune checkpoint molecule, which can stimulate, activate, or increase the intensity of an immune response mediated by a stimulatory immune checkpoint molecule. The antibody or antigen-binding fragment described herein can be derived from any antibody known in the art that activates a stimulatory immune checkpoint molecule. In some embodiments, the antigen-binding fragment is a ligand or receptor of a stimulatory immune checkpoint molecule, e.g., can activate stimulatory immune checkpoint signaling. In some embodiments, the antigen-binding protein (e.g., antibody, antigen-binding domain, or ligand/receptor-Fc fusion protein) described herein is an antagonist of a stimulatory immune checkpoint molecule, which can reduce or block the intensity of an immune response mediated by a stimulatory immune checkpoint molecule.

[0312] In some embodiments, the immune checkpoint molecule is an inhibitory immune checkpoint molecule. In some embodiments, the inhibitory immune checkpoint molecule is selected from the group consisting of PD-1, PD-L1, PD-L2, CTLA-4, LAG-3, TIM-3, HHLA2, CD47, CXCR4, CD160, CD73, BLTA, B7-H4, TIGIT, and VISTA. In some embodiments, the inhibitory immune checkpoint molecule is PD-1, PD-L2, or PD-L1. In some embodiments, the inhibitory immune checkpoint molecule is CTLA-4. In some embodiments, the inhibitory immune checkpoint molecule is TIGIT. Thus, in some embodiments, the antigen-binding protein (e.g., antibody, antigen-binding domain, or ligand/receptor-Fc fusion protein) described herein is an immune checkpoint inhibitor, which totally or partially reduces, inhibits, or interferes with one or more inhibitory immune checkpoint molecules. The antibody or antigen-binding domain described herein can be derived from any antibody known in the art that serves as an immune checkpoint inhibitor. In some embodiments, the antigen-binding fragment is a ligand (e.g., CD155, PD-L2 or PD-L1) or receptor of an inhibitory immune checkpoint molecule (e.g., TIGIT or PD-1), e.g., can activate or stimulate an inhibitory immune checkpoint signaling (e.g., TIGIT or PD-1 signaling). In some embodiments, the antigen-binding protein (e.g., antibody, antigen-binding domain, or ligand/receptor-Fc fusion protein) described herein is an agonist of an inhibitory immune checkpoint molecule, which can stimulate, activate, or increase the intensity of an immune response mediated by an inhibitory immune checkpoint molecule.

[0313] PD-1 (programmed cell death protein 1) is a part of the B7/CD28 family of co-stimulatory molecules that regulate T-cell activation and tolerance, and thus antagonistic anti-PD-1 antibodies or PD-1 ligand-Fc fusion protein can be useful for overcoming tolerance. PD-1 has been defined as a receptor for B7-4. B7-4 can inhibit immune cell activation upon binding to an inhibitory receptor on an immune cell. Engagement of the PD-I/PD-L1 pathway results in inhibition of T-cell effector function, cytokine secretion and proliferation. (Turnis et al., OncoImmunology 1(7):1172-1174, 2012). High levels of PD-1 are associated with exhausted or chronically stimulated T cells. Moreover, increased PD-I expression correlates with reduced survival in cancer patients. Agents for down modulating PD-1, B7-4, and the interaction between B7-4 and PD-I inhibitory signal in an immune cell can result in enhancement of the immune response. Exemplary anti-PD-1 antibodies include, but are not limited to, pembrolizumab (e.g., Keytruda®), cemiplimab (Libtayo®), and nivolumab (e.g., Opdivo®). In some embodiments, the antibody or antigen-binding domain specifically recognizing PD-1 comprises heavy chain CDRs, light chain CDRs, or all six CDRs of pembrolizumab, cemiplimab, or nivolumab. In some embodiments, the antibody or antigen-binding domain specifically recognizing PD-1 comprises VH and/or VL of pembrolizumab, cemiplimab, or nivolumab. In some embodiments, the immunocytokine comprises a parental anti-PD-1 antibody (e.g., full-length antibody). In some embodiments, anti-PD-1 antibody or antigen binding fragment thereof comprises VH-CDR1, VH-CDR2, and VH-CDR3 of a VH comprising the sequence of SEQ ID NO: 102, and VL-CDR1, VL-CDR2, and VL-CDR3 of a VL comprising the sequence of SEQ ID NO: 103. In some embodiments, the anti-PD-1 antibody or antigen binding fragment thereof comprises a VH comprising the sequence of SEQ ID NO: 102 and a VL comprising the sequence of SEQ ID NO: 103. In some embodiments, the anti-PD-1 antibody (e.g., parental full-length antibody) comprises two heavy chains each comprising the sequence of SEQ ID NO: 104 or 105, and two light chains each comprising the sequence of SEQ ID NO: 106. In some embodiments, the anti-PD-1 antibody (e.g., parental antibody) is a homodimeric full-length antibody. In some embodiments, the anti-PD-1 antibody (e.g., parental antibody) is a heterodimeric full-length antibody, e.g., KIH antibody, for example, one heavy chain comprises an Fc domain subunit comprising the sequence of SEQ ID NO: 61 and the other heavy chain comprises an Fc domain subunit comprising the sequence of SEQ ID NO: 62.

[0314] PD-L1 (programmed cell death-ligand 1) is also known as cluster of differentiation 274 (CD274) or B7 homolog 1 (B7-H1). PD-L1 serves as a ligand for PD-1 to play a major role in suppressing the immune system during particular events such as pregnancy, tissue allographs, autoimmune disease and other disease states such as hepatitis and cancer. The formation of PD-1 receptor/PD-L1 ligand complex transmits an inhibitory signal, which reduces the proliferation of CD8⁺ T cells at the lymph nodes. Exemplary anti-PD-L1 antibodies include, but are not limited to, atezolizumab (e.g., Tecentriq®), avelumab (e.g., Bavencio®), and durvalumab (e.g., IMFINZI™) In some embodiments, the antibody or antigen-binding domain specifically recognizing PD-L1 comprises heavy chain CDRs, light chain CDRs, or all six CDRs of atezolizumab, avelumab, or durvalumab. In some embodiments, the antibody or antigen-binding domain specifically recognizing PD-L1 comprises VH and/or VL of atezolizumab, avelumab, or durvalumab. In some embodiments, the immunocytokine comprises a parental anti-PD-L1 antibody (e.g., full-length antibody). In some embodiments, the anti-PD-L1 antibody or antigen binding fragment thereof comprises: i) a VH-CDR1 comprising the sequence of SEQ ID NO: 243; ii) a VH-CDR2 comprising the sequence of SEQ ID NO: 244; iii) a VH-CDR3 comprising the sequence of SEQ ID NO: 245; iv) a VL-CDR1 comprising the sequence of SEQ ID NO: 246; v) a VL-CDR2 comprising the sequence of SEQ ID NO: 247; and vi) a VL-CDR3 comprising the sequence of SEQ ID NO: 248. In some embodiments, the anti-PD-L1 antibody or antigen binding fragment thereof comprises a VH comprising the sequence of SEQ ID NO: 137 and a VL comprising the sequence of SEQ ID NO: 138. In some embodiments, the anti-PD-L1 antibody (e.g., parental full-length antibody) comprises two heavy chains each comprising the sequence of SEQ ID NO: 139, and two light chains each comprising the sequence of SEQ ID NO: 140. In some embodiments, the anti-PD-L1 antibody (e.g., parental full-length antibody) comprises two heavy chains each comprising the sequence of SEQ ID NO: 141, and two light chains each comprising the sequence of SEQ ID NO: 142. In some embodiments, the anti-PD-L1 antibody (e.g., parental antibody) is a homodimeric full-length antibody. In some embodiments, the anti-PD-L1 antibody (e.g., parental antibody) is a heterodimeric full-length antibody, e.g., KIH antibody, for example, one heavy chain comprises an Fc domain subunit comprising the sequence of SEQ ID NO: 61 and the other heavy chain comprises an Fc domain subunit comprising the sequence of SEQ ID NO: 62. In some embodiments, the parental antigen-binding protein comprises (e.g., consists essentially of, or consists of) two antigen-binding polypeptides each comprising (e.g., consists essentially of, or consists of) from N′ to C′: PD-L1 extracellular domain or portion thereof—optional peptide linker—hinge region—Fc domain subunit or portion thereof. In some embodiments, PD-L1 comprises the sequence of SEQ ID NO: 249. In some embodiments, the PD-L1 extracellular domain comprises the sequence of SEQ ID NO: 250. In some embodiments, the PD-L1 extracellular domain or portion thereof is derived from wildtype (e.g., wildtype human) PD-L1. In some embodiments, the PD-L1 extracellular domain or portion thereof comprises one or more mutations (e.g., deletion, insertion, or replacement). In some embodiments, the mutated PD-L1 extracellular domain or portion thereof has increased affinity to PD-1 compared to wildtype PD-L1 extracellular domain or portion thereof. In some embodiments, the mutated PD-L1 extracellular domain or portion thereof has reduced affinity to PD-1 compared to wildtype PD-L1 extracellular domain or portion thereof. In some embodiments, the PD-Li-hinge-Fc fusion protein (e.g., parental fusion protein) is a homodimeric PD-Li-hinge-Fc fusion protein, i.e., two PD-L1-hinge-Fc polypeptides are identical. In some embodiments, the PD-L1-hinge-Fc fusion protein (e.g., parental fusion protein) is a heterodimeric full-length antibody, e.g., one PD-L1-hinge-Fc polypeptide comprises an Fc domain subunit comprising the sequence of SEQ ID NO: 61 and the other PD-L1-hinge-Fc polypeptide comprises an Fc domain subunit comprising the sequence of SEQ ID NO: 62. In some embodiments, such as within the parental PD-Li-hinge-Fc fusion protein, PD-L1 (e.g., PD-L1 extracellular domain) and the hinge region are connected by a peptide linker, such as any peptide linkers described herein. In some embodiments, the peptide linker comprises the sequence of SEQ ID NO: 203, 206, or 213.

[0315] PD-L2 (programmed cell death 1 ligand 2, B7-DC, CD273) is another immune checkpoint receptor ligand of PD-1. PD-L2 plays a role in negative regulation of the adaptive immune response. Engagement of PD-1 by PD-L2 dramatically inhibits T cell receptor (TCR)-mediated proliferation and cytokine production by T cells. At low antigen concentrations, PD-L2-PD-1 interactions inhibit strong B7-CD28 signals. In contrast, at high antigen concentrations, PD-L2-PD-1 interactions reduce cytokine production but do not inhibit T cell proliferation. In some embodiments, the antigen-binding protein (e.g., parental antigen-binding protein) is a PD-L2 (e.g., full length or portion thereof)-hinge-Fc fusion protein. In some embodiments, the antigen-binding protein comprises (e.g., consists essentially of, or consists of) two antigen-binding polypeptides each comprising (e.g., consists essentially of, or consists of) from N′ to C′: PD-L2 extracellular domain or portion thereof—optional peptide linker—hinge region—Fc domain subunit or portion thereof. In some embodiments, PD-L2 comprises the sequence of SEQ ID NO: 175. In some embodiments, the PD-L2 extracellular domain comprises the sequence of SEQ ID NO: 176. In some embodiments, the PD-L2 extracellular domain or portion thereof is derived from wildtype (e.g., wildtype human) PD-L2. In some embodiments, the PD-L2 extracellular domain or portion thereof comprises one or more mutations (e.g., deletion, insertion, or replacement). In some embodiments, the mutated PD-L2 extracellular domain or portion thereof has increased affinity to PD-1 compared to wildtype PD-L2 extracellular domain or portion thereof. In some embodiments, the mutated PD-L2 extracellular domain or portion thereof has reduced affinity to PD-1 compared to wildtype PD-L2 extracellular domain or portion thereof. In some embodiments, the PD-L2-hinge-Fc fusion protein (e.g., parental fusion protein) comprises two PD-L2-hinge-Fc polypeptides each comprising the sequence of SEQ ID NO: 177. In some embodiments, the PD-L2-hinge-Fc fusion protein (e.g., parental fusion protein) is a homodimeric PD-L2-hinge-Fc fusion protein, i.e., two PD-L2-hinge-Fc polypeptides are identical. In some embodiments, the PD-L2-hinge-Fc fusion protein (e.g., parental fusion protein) is a heterodimeric full-length antibody, e.g., one PD-L2-hinge-Fc polypeptide comprises an Fc domain subunit comprising the sequence of SEQ ID NO: 61 and the other PD-L2-hinge-Fc polypeptide comprises an Fc domain subunit comprising the sequence of SEQ ID NO: 62. In some embodiments, such as within the parental PD-L2-hinge-Fc fusion protein, PD-L2 (e.g., PD-L2 extracellular domain) and the hinge region are connected by a peptide linker, such as any peptide linkers described herein. In some embodiments, the peptide linker comprises the sequence of SEQ ID NO: 203, 206, or 213.

[0316] Cytotoxic T-Lymphocyte-Associated protein 4 (CTLA-4, or CD152) is a homolog of CD28, and is known as an inhibitory immune checkpoint molecule upregulated on activated T-cells. CTLA-4 also binds to B7-1 and B7-2, but with greater affinity than CD28. The interaction between B7 and CTLA-4 dampens T cell activation, which constitutes an important mechanism of tumor immune escape. Anti-CTLA-4 antibody therapy has shown promise in a number of cancers, such as melanoma. Exemplary anti-CTLA-4 antibodies include, but are not limited to, ipilimumab (e.g., Yervoy®). In some embodiments, the antibody or antigen-binding domain specifically recognizing CTLA-4 comprises heavy chain CDRs, light chain CDRs, or all six CDRs of ipilimumab. In some embodiments, the antibody or antigen-binding domain specifically recognizing CTLA-4 comprises VH and/or VL of ipilimumab. In some embodiments, the immunocytokine comprises a parental anti-CTLA-4 antibody (e.g., full-length antibody). In some embodiments, the anti-CTLA-4 antibody or antigen binding fragment thereof comprises VH-CDR1, VH-CDR2, and VH-CDR3 of a VH comprising the sequence of SEQ ID NO: 125, and VL-CDR1, VL-CDR2, and VL-CDR3 of a VL comprising the sequence of SEQ ID NO: 126. In some embodiments, the anti-CTLA-4 antibody or antigen binding fragment thereof comprises a VH comprising the sequence of SEQ ID NO: 125 and a VL comprising the sequence of SEQ ID NO: 126. In some embodiments, the anti-CTLA-4 antibody (e.g., parental full-length antibody) comprises two heavy chains each comprising the sequence of SEQ ID NO: 127 or 128, and two light chains each comprising the sequence of SEQ ID NO: 129. In some embodiments, the anti-CTLA-4 antibody or antigen binding fragment thereof comprises a VH of a heavy chain comprising the sequence of SEQ ID NO: 128 and a VL of a light chain comprising the sequence of SEQ ID NO: 129. In some embodiments, the anti-CTLA-4 antibody (e.g., parental antibody) is a homodimeric full-length antibody. In some embodiments, the anti-CTLA-4 antibody (e.g., parental antibody) is a heterodimeric full-length antibody, e.g., KIH antibody, for example, one heavy chain comprises an Fc domain subunit comprising the sequence of SEQ ID NO: 61 and the other heavy chain comprises an Fc domain subunit comprising the sequence of SEQ ID NO: 62.

[0317] TIGIT (also called T cell immunoreceptor with Ig and ITIM domains or VSTM3) is an immune receptor on some T cells and NK cells. For example, TIGIT is found to overexpress on tumor antigen-specific CD8+ T cells and CD8+ tumor infiltrating lymphocytes (TILs) in melanoma. When TIGIT is bound by its ligand CD155 (PVR), which is expressed on tumor cells, dendritic cells, macrophages, etc., TIGIT sends an inhibitory signal to T cells or NK cells.

[0318] Cell Surface Ligand or Receptor

[0319] In some embodiments, the target antigen or epitope is a ligand or receptor or portion thereof, such as extracellular domain of a ligand/receptor. In some embodiments, the ligand or receptor is derived from a molecule selected from the group consisting of IL-2, IL-2Rα (CD25), IL-3Ru (CD123), PD-1, PD-L1, PD-L2, CD155, NKG2A, NKG2C, NKG2F, NKG2D, BCMA, APRIL, BAFF, IL-3, IL-13, LLT1, AICL, DNAM-1, and NKp80. In some embodiments, the ligand is derived from APRIL and/or BAFF, which can bind to BCMA. In some embodiments, the receptor is an FcR and the ligand is an Fc-containing molecule. In some embodiments, the FcR is an Fcγ receptor (FcγR). In some embodiments, the FcγR is selected from the group consisting of FcγRIA (CD64A), FcγRIB (CD64B), FcγRIC (CD64C), FcγRIIA (CD32A), FcγRIIB (CD32B), FcγRIIIA (CD16a), and FcγRIIIB (CD16b). In some embodiments, the target antigen or epitope is PD-1, such as extracellular domain (or portion thereof) of PD-1. In some embodiments, the antigen-binding fragment of the antigen-binding polypeptide is PD-L2 or PD-L1, such as extracellular domain (or portion thereof) of PD-L2 or PD-L1. In some embodiments, the PD-L2 extracellular domain comprises the sequence of SEQ ID NO: 176. In some embodiments, the PD-L1 extracellular domain comprises the sequence of SEQ ID NO: 250. In some embodiments, the antigen-binding fragment of the antigen-binding polypeptide is CD155, such as extracellular domain (or portion thereof) of CD155. In some embodiments, the CD155 extracellular domain comprises the sequence of SEQ ID NO: 267.

[0320] The receptor of IL-2, interleukin-2 receptor (IL-2R), is a heterotrimeric protein expressed on the surface of certain immune cells, such as lymphocytes. IL-2R has three forms generated by different combinations of α chain (IL-2Rα, CD25, Tac antigen), β chain (IL-2Rβ, CD122), and γ chain (IL-2Rγ, γ_{c}, common gamma chain, or CD132). IL-2Rα binds IL-2 with low affinity, and the complex of IL-2Rβ and IL-2Ry binds IL-2 with intermediate affinity, primarily on memory T cells and NK cells. The complex of all α, β, and γ chains bind IL-2 with high affinity on activated T cells and regulatory T cells (Tregs). CD25 (IL-2Rα) plays a critical role in the development and maintenance of Tregs, and may play a role in Treg expression of CD62L, which is required for the entry of Tregs into lymph nodes (Malek and Bayer, 2004). CD25 is a marker for activated T cells and Treg. Experimental data suggested an immunosuppressive capacity of anti-CD25 that significantly delayed rejection of heart allografts in the mouse (Kirkman et al., 1985) and of renal allografts in nonhuman primates (Reed et al., 1989). Exemplary anti-CD25 antibodies include, but are not limited to basiliximab (e.g., Simulect®), daclizumab (e.g., Zinbryta®). In some embodiments, the antibody or antigen-binding domain specifically recognizing CD25 comprises heavy chain CDRs, light chain CDRs, or all six CDRs of basiliximab or daclizumab. In some embodiments, the antibody or antigen-binding domain specifically recognizing CD25 comprises VH and/or VL of basiliximab or daclizumab. In some embodiments, the immunocytokine comprises a parental anti-CD25 antibody (e.g., full-length antibody). In some embodiments, the anti-CD25 antibody or antigen binding fragment thereof comprises VH-CDR1, VH-CDR2, and VH-CDR3 of a VH comprising the sequence of SEQ ID NO: 162, and VL-CDR1, VL-CDR2, and VL-CDR3 of a VL comprising the sequence of SEQ ID NO: 163. In some embodiments, the anti-CD25 antibody or antigen binding fragment thereof comprises a VH comprising the sequence of SEQ ID NO: 162 and a VL comprising the sequence of SEQ ID NO: 163. In some embodiments, the anti-CD25 antibody (e.g., parental full-length antibody) comprises two heavy chains each comprising the sequence of SEQ ID NO: 164, and two light chains each comprising the sequence of SEQ ID NO: 165. In some embodiments, the anti-CD25 antibody or antigen binding fragment thereof comprises VH-CDR1, VH-CDR2, and VH-CDR3 of a heavy chain comprising the sequence of SEQ ID NO: 166, and VL-CDR1, VL-CDR2, and VL-CDR3 of a light chain comprising the sequence of SEQ ID NO: 167. In some embodiments, the anti-CD25 antibody or antigen binding fragment thereof comprises a VH of a heavy chain comprising the sequence of SEQ ID NO: 166, and a VL of a light chain comprising the sequence of SEQ ID NO: 167. In some embodiments, the anti-CD25 antibody (e.g., parental full-length antibody) comprises two heavy chains each comprising the sequence of SEQ ID NO: 166, and two light chains each comprising the sequence of SEQ ID NO: 167. In some embodiments, the anti-CD25 antibody (e.g., parental antibody) is a homodimeric full-length antibody. In some embodiments, the anti-CD25 antibody (e.g., parental antibody) is a heterodimeric full-length antibody, e.g., KIH antibody, for example, one heavy chain comprises an Fc domain subunit comprising the sequence of SEQ ID NO: 61 and the other heavy chain comprises an Fc domain subunit comprising the sequence of SEQ ID NO: 62.

[0321] Immune Cell Surface Antigen

[0322] In some embodiments, the target antigen or epitope is an immune cell surface antigen or epitope. Immune cells have different cell surface molecules. For example CD3 is a cell surface molecule on T-cells, whereas CD16, NKG2D, or NKp30 are cell surface molecules on NK cells, and CD3 or an invariant T-cell receptor (TCR) are the cell surface molecules on NKT-cells. In some embodiments, wherein the immune cell is a T-cell, the activation molecule is one or more of CD3, e.g., CD3R, CD36, or CD3γ; or CD2, CD4, CD8, CD27, CD28, CD40, CD134, CD137, CD278, inhibitory immune checkpoint molecules (e.g., CTLA-4, PD-1, TIM3, BTLA, VISTA, LARG-3, or TIGIT), and stimulatory immune checkpoint molecules (CD27, CD28, CD137, OX40, GITR, or HVEM). In some embodiments, wherein the immune cell is a B cell, the cell surface molecule is CD19, CD20, or CD138. In other some embodiments, wherein the immune cell is a NK cell, the cell surface molecule is CD16, CD56 (NCAM), NKp46, NKp44, CD244, CD226, TIGIT, CD96, LAG3, TIM3, PD-1, KLRG1, CD161, CD94/NKG2, KIR, NKG2D, or NKp30. In some embodiments, wherein the immune cell is a NKT-cell, the cell surface molecule is CD3 or an invariant TCR. In some embodiments, wherein the immune cell is a myeloid dendritic cell (mDC), the cell surface molecule is CD11c, CD11b, CD13, CD45RO, or CD33. In some embodiments, wherein the immune cell is a plasma dendritic cell (pDC), the cell surface molecule is CD123, CD62L, CD45RA, or CD36. In some embodiments, wherein the immune cell is a macrophage, the cell surface molecule is CD163 or CD206. In some embodiments, the immune cell is selected from the group consisting of a monocyte, a dendritic cell, a macrophage, a B cell, a killer T cell (T_{c}, cytotoxic T lymphocyte, or CTL), a helper T cell (Th), a regulatory T cells (Treg), a γ6 T cell, a natural killer T (NKT) cell, and a natural killer (NK) cell.

[0323] In some embodiments, the immune cell surface antigen is selected from the group consisting of CD3 (e.g., CD3R, CD36, CD3γ), CD4, CD5, CD8, CD16, CD27, CD28, CD40, CD64, CD89, CD134, CD137, CD278, NKp46, NKp30, NKG2D, TCRa, TCRP, TCRy, and TCR6. In some embodiments, the immune cell surface antigen is CD3, CD4, or CD8.

[0324] CD3 comprises three different polypeptide chains (ε, δ and γ chains), is an antigen expressed by T cells, including cytotoxic T cell (CD8+ naive T cells) and T helper cells (CD4+ naive T cells). The three CD3 polypeptide chains associate with the TCR and the ξ-chain to form the TCR complex, which has the function of activating signaling cascades in T cells. Currently, many therapeutic strategies target the TCR signal transduction to treat diseases using anti-human CD3 monoclonal antibodies. The CD3 specific antibody OKT3 is the first monoclonal antibody approved for human therapeutic use, and is clinically used as an immunomodulator for the treatment of allogenic transplant rejections. Otelixizumab (TRX4) is a monoclonal antibody specifically targeting CD3R, and is being developed for the treatment of type 1 diabetes and other autoimmune diseases. In some embodiments, the antibody or antigen-binding domain specifically recognizing CD3 comprises heavy chain CDRs, light chain CDRs, or all six CDRs of OKT3 or otelixizumab. In some embodiments, the antibody or antigen-binding domain specifically recognizing CD3 comprises VH and/or VL of OKT3 or otelixizumab. In some embodiments, the anti-CD3 antibody or antigen binding fragment thereof does not compete with OKT3 antibody for binding to CD3, and is unable to activate TCR signaling (i.e., non-active anti-CD3 antibody). In some embodiments, the anti-CD3 antibody or antigen binding fragment specifically recognizes CD3. In some embodiments, the immunocytokine comprises a parental anti-CD3 antibody (e.g., full-length antibody). In some embodiments, anti-CD3 (e.g., CD3E) antibody or antigen binding fragment thereof comprises: i) a VH-CDR1 comprising the sequence of SEQ ID NO: 85; ii) a VH-CDR2 comprising the sequence of SEQ ID NO: 86; iii) a VH-CDR3 comprising the sequence of SEQ ID NO: 87; iv) a VL-CDR1 comprising the sequence of SEQ ID NO: 88; v) a VL-CDR2 comprising the sequence of SEQ ID NO: 89; and vi) a VL-CDR3 comprising the sequence of SEQ ID NO: 90. In some embodiments, the anti-CD3 (e.g., CD3E) antibody or antigen binding fragment thereof comprises a VH comprising the sequence of SEQ ID NO: 91 and a VL comprising the sequence of SEQ ID NO: 92. In some embodiments, the anti-CD3 antibody (e.g., parental full-length antibody) comprises two heavy chains each comprising the sequence of SEQ ID NO: 93, and two light chains each comprising the sequence of SEQ ID NO: 94. In some embodiments, the anti-CD3 antibody (e.g., parental antibody) is a homodimeric full-length antibody. In some embodiments, the anti-CD3 antibody (e.g., parental antibody) is a heterodimeric full-length antibody, e.g., KIH antibody, for example, one heavy chain comprises an Fc domain subunit comprising the sequence of SEQ ID NO: 61 and the other heavy chain comprises an Fc domain subunit comprising the sequence of SEQ ID NO: 62.

[0325] CD4 is a glycoprotein expressed on the surface of immune cells such as T helper cells (CD4+T helper cells), monocytes, macrophages, and dendritic cells. CD4 is a co-receptor of the TCR and assists TCR in communicating with antigen-presenting cells. Exemplary anti-CD4 antibodies include, but are not limited to, Ibalizumab (e.g., Trogarzo®), MAX.16H5, and IT1208. MAX.16H5 is an anti-human CD4 antibody applied intravenously in clinical trials for the treatment of autoimmune diseases (e.g., rheumatoid arthritis) and acute late-onset rejection after transplantation of a renal allograft. IT1208 is a defucosylated humanized anti-CD4 depleting antibody currently under clinical trial for treating advanced solid tumors. In some embodiments, Ibalizumab was used as the parental anti-CD4 antibody (e.g., full-length antibody). Ibalizumab is a non-immunosuppressive humanized monoclonal antibody that has been approved by FDA in HV treatment. In some embodiments, the antigen-binding domain specifically recognizing CD4 comprises heavy chain CDRs, light chain CDRs, or all six CDRs of Ibalizumab, MAX.16H5 or IT1208. In some embodiments, the antigen-binding domain specifically recognizing CD4 comprises VH and/or VL of Ibalizumab, MAX.16H5 or IT1208. In some embodiments, the immunocytokine comprises a parental anti-CD4 antibody (e.g., full-length antibody). In some embodiments, anti-CD4 antibody or antigen binding fragment thereof comprises: i) a VH-CDR1 comprising the sequence of SEQ ID NO: 67; ii) a VH-CDR2 comprising the sequence of SEQ ID NO: 68; iii) a VH-CDR3 comprising the sequence of SEQ ID NO: 69; iv) a VL-CDR1 comprising the sequence of SEQ ID NO: 70; v) a VL-CDR2 comprising the sequence of SEQ ID NO: 71; and vi) a VL-CDR3 comprising the sequence of SEQ ID NO: 72. In some embodiments, the anti-CD4 antibody or antigen binding fragment thereof comprises a VH comprising the sequence of SEQ ID NO: 73 and a VL comprising the sequence of SEQ ID NO: 74. In some embodiments, the anti-CD4 antibody (e.g., parental full-length antibody) comprises two heavy chains each comprising the sequence of SEQ ID NO: 75 or 76, and two light chains each comprising the sequence of SEQ ID NO: 77. In some embodiments, the anti-CD4 antibody (e.g., parental antibody) is a homodimeric full-length antibody. In some embodiments, the anti-CD4 antibody (e.g., parental antibody) is a heterodimeric full-length antibody, e.g., KIH antibody, for example, one heavy chain comprises an Fc domain subunit comprising the sequence of SEQ ID NO: 61 and the other heavy chain comprises an Fc domain subunit comprising the sequence of SEQ ID NO: 62.

[0326] CD8 is a transmembrane glycoprotein that serves as a co-receptor for TCR. CD8 binds to and is specific for MHC class I protein. The most common form of CD8 is composed of a CD8-α and CD8-β chain. CD8 is predominantly expressed on the surface of cytotoxic T cells, but can also be found on natural killer cells, cortical thymocytes, and dendritic cells. CD8 is a marker for cytotoxic T cell population. CD8 is expressed in T cell lymphoblastic lymphoma and hypo-pigmented mycosis fungoides. Exemplary anti-CD8 antibodies include, but are not limited to, G10⁻¹, OKT8, YTC182.20, 4B11, and DK25. In some embodiments, the antigen-binding domain specifically recognizing CD8 comprises heavy chain CDRs, light chain CDRs, or all six CDRs of any of G10⁻¹, OKT8, YTC182.20, 4B11, or DK25. In some embodiments, the antigen-binding domain specifically recognizing CD8 comprises VH and/or VL of any of G10⁻¹, OKT8, YTC182.20, 4B11, or DK25. In some embodiments, the immunocytokine comprises a parental anti-CD8 antibody (e.g., full-length antibody). In some embodiments, anti-CD8 antibody or antigen binding fragment thereof comprises VH-CDR1, VH-CDR2, and VH-CDR3 of a VH comprising the sequence of SEQ ID NO: 114, and VL-CDR1, VL-CDR2, and VL-CDR3 of a VL comprising the sequence of SEQ ID NO: 115. In some embodiments, the anti-CD8 antibody or antigen binding fragment thereof comprises a VH comprising the sequence of SEQ ID NO: 114 and a VL comprising the sequence of SEQ ID NO: 115. In some embodiments, the anti-CD8 antibody (e.g., parental full-length antibody) comprises two heavy chains each comprising the sequence of SEQ ID NO: 116, and two light chains each comprising the sequence of SEQ ID NO: 117. In some embodiments, the anti-CD8 antibody (e.g., parental antibody) is a homodimeric full-length antibody. In some embodiments, the anti-CD8 antibody (e.g., parental antibody) is a heterodimeric full-length antibody, e.g., KIH antibody, for example, one heavy chain comprises an Fc domain subunit comprising the sequence of SEQ ID NO: 61 and the other heavy chain comprises an Fc domain subunit comprising the sequence of SEQ ID NO: 62.

### Hinge

[0327] Hinge connects the Fd region (VH and CH1 domains) and the Fc region of a heavy chain of an immunoglobulin. In some embodiments, a hinge region connects an antigen-binding fragment (e.g., ligand, receptor, VHH, scFv, or Fab) and an Fc domain subunit or portion thereof (e.g., CH2+CH3, or CH2 only). The hinge region, found in IgG, IgA, and IgD immunoglobulin classes, acts as a flexible spacer that allows the Fab portion of an immunoglobulin to move freely in space relative to the Fc region. The hinge domains are structurally diverse, varying in both sequence and length among immunoglobulin classes and subclasses. The heavy chains are inter-connected via disulfide bonds in the hinge region. According to crystallographic studies, the immunoglobulin hinge region can be further subdivided structurally and functionally into three regions: the upper hinge, the core, and the lower hinge. See Shin et al., Immunological Reviews 130:87 (1992). The upper hinge includes amino acids from the carboxyl end of CH1 to the first residue in the hinge that restricts motion, generally the first cysteine residue that forms an interchain disulfide bond between the two heavy chains. The length of the upper hinge region correlates with the segmental flexibility of the antibody. The core hinge region contains the inter-heavy chain disulfide bridges. The lower hinge region joins the amino terminal end of, and includes residues in, the CH2 domain. Id. The hinge region of a human IgG1 antibody corresponds to amino acids 216-230 according to the EU numbering as set forth in Kabat. The core hinge region of human IgG1 contains the sequence Cys-Pro-Pro-Cys that, when dimerized by disulfide bond formation, results in a cyclic octapeptide believed to act as a pivot, thus conferring flexibility. Conformational changes permitted by the structure and flexibility of the immunoglobulin hinge region polypeptide sequence may affect the effector functions of the Fc portion of the antibody.

[0328] In some embodiments, the hinge region may contain one or more glycosylation site(s), which include a number of structurally distinct types of sites for carbohydrate attachment. For example, IgA₁ contains five glycosylation sites within a 17 amino acid segment of the hinge region, conferring exceptional resistance of the hinge region polypeptide to intestinal proteases, considered an advantageous property for a secretory immunoglobulin.

[0329] In some embodiments, the immunocytokine comprises a hinge region that is present in a naturally occurring parental antibody. For example, the parental antibody is an IgG1 antibody, and the hinge region of the antibody or antigen-binding fragment within the immunocytokine described herein is an IgG1-type hinge region. In some embodiments, the immunocytokine contains a modification of the antibody heavy chain hinge region. For example, the hinge region or a portion thereof has been modified, e.g., by deletion, insertion, or replacement, e.g., with a hinge region or a portion thereof which differs from the hinge region present in a naturally occurring antibody of the same class (e.g., IgG, IgA, or IgE) and subclass (e.g., IgG1, IgG2, IgG3, and IgG4, etc.). For example, an IgG1, IgG2, or IgG3 antibody may contain an IgG4-type hinge region. In some embodiments, the hinge region or a portion thereof comprises a mutation, e.g., deletion, insertion, or replacement, at one or more of the upper hinge, the core, and the lower hinge of the hinge region, as long as inter-chain disulfide bond(s) can still be formed, the immunocytokine has flexibility to ensure target antigen-antigen binding fragment binding, masking cytokine activity in the absence of target antigen-antibody binding, while unmasking cytokine activity in the presence of target antigen-antibody binding, providing flexibility and/or sufficient space between two cytokine subunits or two cytokine moieties to ensure proper cytokine activity (binding affinity and/or bioactivity), and/or optionally does not abolish effector function(s) of the Fc portion. In some embodiments, the hinge region is or is derived from a human IgG1, IgG2, IgG3, or IgG4 hinge. In some embodiments, the hinge region is a mutated human IgG1, IgG2, IgG3, or IgG4 hinge. In some embodiments, one or more mutations, e.g., deletion, insertion, or replacement, are introduced at one or more of the upper hinge, the core, and the lower hinge of the hinge region in order to reduce or eliminate effector function (e.g., ADCC, and/or CDC) of the Fc domain, such as L234 and/or L235 mutations in the IgG1 lower hinge region, e.g., one or two of L234A, L234K, L234D, L235E, L235K, and L235A mutations. In some embodiments, the hinge region comprises L234K and L235K mutations. In some embodiments, the hinge region comprises L234D and L235E mutations. In some embodiments, the hinge region is truncated or mutated with less cysteines in order to reduce disulfide bond mis-pairing during dimerization of the Fc domain. In some embodiments, one or more asymmetric charged mutation(s) is introduced into the lower hinge to facilitate heterodimer formation, e.g., one polypeptide comprises L234K+L235K in the IgG1 lower hinge region, while the pairing polypeptide comprises L234D+L235E in the IgG1 lower hinge region. In some embodiments, the hinge region comprises the amino acid sequence of EPKSCDKTHTCPPCPAPELLGGP (SEQ ID NO: 40). In some embodiments, the hinge region is an IgG1 hinge comprising L234K and L235K mutations. In some embodiments, the hinge region comprises the amino acid sequence of EPKSCDKTHTCPPCPAPEKKGGP (SEQ ID NO: 41). In some embodiments, the hinge region is an IgG1 hinge comprising L234D and L235E mutations. In some embodiments, the hinge region comprises the amino acid sequence of EPKSCDKTHTCPPCPAPEDEGGP (SEQ ID NO: 42). In some embodiments, the hinge region comprises the amino acid sequence of ERKCCVECPPCPAPPVAGP (SEQ ID NO: 46). In some embodiments, the hinge region comprises the amino acid sequence of ESKYGPPCPSCPAPEFLGGP (SEQ ID NO: 47). In some embodiments, the hinge region comprises the amino acid sequence of ESKYGPPCPPCPAPEFLGGP (SEQ ID NO: 58). In some embodiments, the hinge region comprises the amino acid sequence of any of EPKSCDKDKTHTCPPCPAPELLGGP (SEQ ID NO: 43), EPKSCDKDKTHTCPPCPAPEKKGGP (SEQ ID NO: 44), or EPKSCDKDKTHTCPPCPAPEDEGGP (SEQ ID NO: 45). In some embodiments, the hinge region comprises the amino acid sequence of any of EPKSCDKPDKTHTCPPCPAPELLGGP (SEQ ID NO: 55), EPKSCDKPDKTHTCPPCPAPEKKGGP (SEQ ID NO: 56), EPKSCDKPDKTHTCPPCPAPEDEGGP (SEQ ID NO: 57), or EPPKSCDKTHTCPPCPAPELLGGP (SEQ ID NO: 59). In some embodiments, the hinge region, such as the hinge N′ portion, comprises the amino acid sequence of any of EPKSCDKP (SEQ ID NO: 54), EPKSCDK (SEQ ID NO: 48), or EPKSC (SEQ ID NO: 49). In some embodiments, the hinge region comprises the amino acid sequence of DKTHT (SEQ ID NO: 53). In some embodiments, the hinge region, such as the hinge C′ portion, comprises the amino acid sequence of any of DKTHTCPPCPAPELLGGP (SEQ ID NO: 50), DKTHTCPPCPAPEKKGGP (SEQ ID NO: 51), or DKTHTCPPCPAPEDEGGP (SEQ ID NO: 52).

[0330] In some embodiments, the cytokine or variant thereof described herein is positioned at the N-terminus of the hinge region of a heavy chain of a full-length antibody, i.e., positioned between the C-terminus of the CH1 and the N-terminus of the hinge region of the heavy chain of the full-length antibody. In some embodiments, the heavy chain fusion polypeptide comprises from N′ to C′: VH-CH1-cytokine moiety-hinge-CH2-CH3. In some embodiments, the cytokine or variant thereof is positioned at the N-terminus of the hinge region between an antigen-binding fragment (e.g., ligand, receptor, VHH, scFv, or Fab) and an Fc domain subunit or portion thereof (e.g., CH2-CH3, or CH2). For example, in some embodiments, the immunocytokine comprises a polypeptide of any of from N′ to C′: (1) VH-cytokine moiety-hinge-CH2-CH3; (2) VL-cytokine moiety-hinge-CH2-CH3; (3) VH-optional linker-VL-cytokine moiety-hinge-CH2-CH3; (4) VL-optional linker-VH-cytokine moiety-hinge-CH2-CH3; (5) VH-CH1-cytokine moiety-hinge-CH2-CH3; (6) VH-cytokine moiety-hinge-CH2; (7) VL-cytokine moiety-hinge-CH2; (8) VH-optional linker-VL-cytokine moiety-hinge-CH2; (9) VL-optional linker-VH-cytokine moiety-hinge-CH2; (10) VH-CH1-cytokine moiety-hinge-CH2; (11) ligand-optional linker-cytokine moiety-hinge-CH2-CH3; (12) ligand-optional linker-cytokine moiety-hinge-CH2; (13) receptor-optional linker-cytokine moiety-hinge-CH2-CH3; or (14) receptor-optional linker-cytokine moiety-hinge-CH2. In some embodiments, the cytokine or variant thereof is positioned at the N-terminus of a hinge region comprising the sequence of any of SEQ ID NOs: 50-52.

[0331] In some embodiments, the cytokine or variant thereof described herein is positioned at the C-terminus of the hinge region of a heavy chain of a full-length antibody, i.e., the heavy chain fusion polypeptide comprises from N′ to C′: VH-CH1-hinge-cytokine moiety-CH2-CH3. In some embodiments, the cytokine or variant thereof is positioned at the C-terminus of the hinge region between an antigen-binding fragment (e.g., ligand, receptor, VHH, scFv, or Fab) and an Fc domain subunit or portion thereof (e.g., CH2). For example, in some embodiments, the immunocytokine comprises a polypeptide of any of from N′ to C′: (1) VH-hinge-cytokine moiety-CH2-CH3; (2) VL-hinge-cytokine moiety-CH2-CH3; (3) VH-optional linker-VL-hinge-cytokine moiety-CH2-CH3; (4) VL-optional linker-VH-hinge-cytokine moiety-CH2-CH3; (5) VH-CH1-hinge-cytokine moiety-CH2-CH3; (6) VH-hinge-cytokine moiety-CH2; (7) VL-hinge-cytokine moiety-CH2; (8) VH-optional linker-VL-hinge-cytokine moiety-CH2; (9) VL-optional linker-VH-hinge-cytokine moiety-CH2; (10) VH-CH1-hinge-cytokine moiety-CH2; (11) ligand-hinge-cytokine moiety-CH2-CH3; (12) ligand-hinge-cytokine moiety-CH2; (13) receptor-hinge-cytokine moiety-CH2-CH3; or (14) receptor-hinge-cytokine moiety-CH2. In some embodiments, the cytokine or variant thereof is positioned at the C-terminus of a hinge region comprising the sequence of any of SEQ ID NOs: 40-47, 50-52, and 55-59.

[0332] In some embodiments, the cytokine or variant thereof described herein is positioned within the hinge region of a heavy chain of a full-length antibody, i.e., the heavy chain fusion polypeptide comprises from N′ to C′: VH-CH1-hinge N′ portion-cytokine moiety-hinge C′ portion-CH2-CH3. In some embodiments, the cytokine or variant thereof replaces a portion of the hinge region. In some embodiments, the cytokine or variant thereof is inserted within the hinge region, without deleting any hinge amino acid. In some embodiments, the cytokine or variant thereof is inserted within a hinge region comprising the sequence of any of SEQ ID NOs: 40-47 and 55-59. In some embodiments, the cytokine or variant thereof is inserted between an N′ hinge portion comprising the sequence of any of SEQ ID NOs: 48, 49, and 54, and a C′ hinge portion comprising the sequence of any of SEQ ID NOs: 50-52. In some embodiments, the cytokine or variant thereof with a peptide linker fused to the N′ of the cytokine or variant thereof is inserted within the hinge region. In some embodiments, the cytokine or variant thereof with a peptide linker fused to the C′ of the cytokine or variant thereof is inserted within the hinge region. For example, in some embodiments, the hinge-cytokine portion comprises a structure of from N′ to C′: hinge N′ portion-optional N′ peptide linker-cytokine moiety-optional C′ peptide linker-hinge C′ portion.

[0333] In some embodiments, the hinge region is an IgG1 hinge, and the cytokine or variant thereof is inserted between “EPKSC” (SEQ ID NO: 49) and “DKTHT” (SEQ ID NO: 53). In some embodiments, the N′ peptide linker comprises the amino acid sequence of DKP (SEQ ID NO: 231) or P (SEQ ID NO: 242). Hence in some embodiments, the cytokine or variant thereof is inserted between an additionally introduced “DKP” and the “DKTHT” sequence. In some embodiments, the N′ peptide linker comprises the amino acid sequence of DKPGS (SEQ ID NO: 232), PGS (SEQ ID NO: 233), or GS (SEQ ID NO: 234). In some embodiments, the N′ peptide linker comprises the amino acid sequence of DKPGSG (SEQ ID NO: 235), PGSG (SEQ ID NO: 236), or GSG (SEQ ID NO: 203). In some embodiments, the N′ peptide linker comprises the amino acid sequence of DKPGSGS (SEQ ID NO: 237), PGSGS (SEQ ID NO: 238), or GSGS (SEQ ID NO: 239). In some embodiments, the N′ peptide linker comprises the amino acid sequence of DKPGSGGGGG (SEQ ID NO: 240), PGSGGGGG (SEQ ID NO: 241), GSGGGGG (SEQ ID NO: 206). In some embodiments, the cytokine or variant thereof is positioned within the hinge region between an antigen-binding fragment (e.g., ligand, receptor, VHH, scFv, or Fab) and an Fc domain subunit or portion thereof (e.g., CH2). For example, in some embodiments, the immunocytokine comprises a polypeptide of any of from N′ to C′: (1) VH-hinge N′ portion-optional N′ peptide linker-cytokine moiety-optional C′ peptide linker-hinge C′ portion-CH2-CH3; (2) VL-hinge N′ portion-optional N′ peptide linker-cytokine moiety-optional C′ peptide linker-hinge C′ portion-CH2-CH3; (3) VH-optional linker-VL-hinge N′ portion-optional N′ peptide linker-cytokine moiety-optional C′ peptide linker-hinge C′ portion-CH2-CH3; (4) VL-optional linker-VH-hinge N′ portion-optional N′ peptide linker-cytokine moiety-optional C′ peptide linker-hinge C′ portion-CH2-CH3; (5) VH-CH1-hinge N′ portion-optional N′ peptide linker-cytokine moiety-optional C′ peptide linker-hinge C′ portion-CH2-CH3; (6) VH-hinge N′ portion-optional N′ peptide linker-cytokine moiety-optional C′ peptide linker-hinge C′ portion-CH2; (7) VL-hinge N′ portion-optional N′ peptide linker-cytokine moiety-optional C′ peptide linker-hinge C′ portion-CH2; (8) VH-optional linker-VL-hinge N′ portion-optional N′ peptide linker-cytokine moiety-optional C′ peptide linker-hinge C′ portion-CH2; (9) VL-optional linker-VH-hinge N′ portion-optional N′ peptide linker-cytokine moiety-optional C′ peptide linker-hinge C′ portion-CH2; (10) VH-CH1-hinge N′ portion-optional N′ peptide linker-cytokine moiety-optional C′ peptide linker-hinge C′ portion-CH2; (11) ligand-optional linker-hinge N′ portion-optional N′ peptide linker-cytokine moiety-optional C′ peptide linker-hinge C′ portion-CH2-CH3; (12) ligand-optional linker-hinge N′ portion-optional N′ peptide linker-cytokine moiety-optional C′ peptide linker-hinge C′ portion-CH2; (13) receptor-optional linker-hinge N′ portion-optional N′ peptide linker-cytokine moiety-optional C′ peptide linker-hinge C′ portion-CH2-CH3; or (14) receptor-optional linker-hinge N′ portion-optional N′ peptide linker-cytokine moiety-optional C′ peptide linker-hinge C′ portion-CH2.

### Fc Domains

[0334] The immunocytokine descried herein comprises an Fc domain or portion thereof at the C-terminus. Fc domain comprises a CH2 domain and a CH3 domain. In some embodiments, the Fc domain portion comprises (consists essentially of or consists of) a CH2 domain. In some embodiments, the Fc domain portion comprises (consists essentially of or consists of) a CH3 domain.

[0335] In some embodiments, the Fc domain is derived from any of IgA, IgD, IgE, IgG, and IgM, and subtypes thereof. In some embodiments, the Fc domain comprises CH2 and CH3. In some embodiments, the Fc domain is derived from an IgG (e.g., IgG1, IgG2, IgG3, or IgG4). In some embodiments, the Fc domain is derived from a human IgG. In some embodiments, the Fc domain is derived from a human IgG1 or human IgG4. In some embodiments, the two subunits of the Fc domain dimerize via one or more (e.g., 1, 2, 3, 4, or more) disulfide bonds. In some embodiments, each subunit of the Fc domain comprises a full-length Fc sequence. In some embodiments, each subunit of the Fc domain comprises an N-terminus truncated Fc sequence. In some embodiments, the Fc domain is truncated at the N-terminus, e.g., lacks the first 1, 2, 3, 4, 5, 6, 7, 8, 9, or 10 amino acids of a complete immunoglobulin Fc domain. In some embodiments, the Fc domain comprises the amino acid sequence of any of SEQ ID NOs: 60-66.

[0336] Via the Fc domain, immunocytokines can activate complement and interact with Fc receptors. This inherent immunoglobulin feature has been viewed unfavorably because immunocytokines may be targeted to cells expressing Fc receptors rather than the preferred antigen-bearing cells. Moreover, the simultaneous activation of cytokine receptors and Fc receptor signaling pathways leading to cytokine release, especially in combination with the long half-life of immunoglobulin fusion proteins, make their application in a therapeutic setting difficult due to systemic toxicity. Thus in some embodiments, the Fc domain is engineered to have altered binding to an Fc receptor (FcR), specifically altered binding to an Fcγ receptor, and/or altered effector function, such as altered (e.g., reduced or eliminated) antibody-dependent cell-mediated cytotoxicity (ADCC), Antibody-dependent Cellular Phagocytosis (ADCP), and/or Complement-dependent cytotoxicity (CDC).

[0337] Although the presence of an Fc domain is essential for prolonging the half-life of the immunocytokine, in some situations it will be beneficial to eliminate effector functions associated with engagement of Fc receptors by the Fc domain. Hence, in some embodiments the altered binding to an Fc receptor and/or effector function is reduced binding and/or effector function. In some embodiments, the Fc domain comprises one or more amino acid mutation that reduces the binding of the Fc domain to an Fc receptor, particularly an Fcγ receptor (responsible for ADCC).

[0338] Preferably, such an amino acid mutation does not reduce binding to FcRn receptors (responsible for half-life). In some embodiments, the Fc domain subunit comprises the amino acid sequence of SEQ ID NO: 64 or 65. In some embodiments, the Fc domain is derived from human IgG1 and comprises the amino acid substitution N295A. In some embodiments, the Fc domain is derived from human IgG4 and comprises the amino acid substitutions S228P and L235E at the hinge region. In some embodiments, the Fc domain is derived from human IgG1 and comprises the amino acid substitutions L234A and L235A (“LALA”) at the hinge region. In some embodiments, the Fc domain is derived from human IgG1 and comprises the amino acid substitutions L234A and L235A at the hinge region, and P329G, e.g., in each of its subunits. See, e.g., Lo M. et al. J Biol Chem. 2017 Mar. 3; 292(9):3900-3908; Schlothauer T. et al. Protein Eng Des Sel. 2016 October; 29(10):457-466.

[0339] In some embodiments, the Fc domain (e.g., human IgG1) is mutated to remove one or more effector functions such as ADCC, ADCP, or CDC, namely, an “effectorless” or “almost effectorless” Fc domain. For example, in some embodiments, the Fc domain is an effectorless IgG1 Fc comprising one or more of the following mutations (such as in each of its subunits): L234A, L235E, G237A, A330S, and P331S. The combinations of K322A, L234A, and L235A in IgG1 are sufficient to almost completely abolish FcγR and Clq binding (Hezareh et al. J Virol 75, 12161-12168, 2001). MedImmune identified that a set of three mutations L234F/L235E/P331S have a very similar effect (Oganesyan et al., Acta Crystallographica 64, 700-704, 2008). In some embodiments, the Fc domain comprises a modification of the glycosylation on N297 of the IgG1 Fc domain, which is known to be required for optimal FcR interaction. The Fc domain modification can be any suitable IgG Fc engineering mentioned in Wang et al. (“IgG Fc engineering to modulate antibody effector functions,” Protein Cell. 2018 January; 9(1): 63-73), the content of which is incorporated herein by reference in its entirety.

[0340] In some embodiments, the Fc domain comprises two identical polypeptide chains (identical Fc subunits). Such Fc domains are herein also referred to as “homodimeric Fc domains.” In some embodiments, each subunit of the homodimeric Fc domain comprises the amino acid sequence of any of SEQ ID NOs: 60, and 63-66.

[0341] In some embodiments, the Fc domain comprises a modification promoting heterodimerization of two non-identical polypeptide chains. Such Fc domains are herein also referred to as “heterodimeric Fc domains.” In some embodiments, the Fc domain comprises a knob-into-hole (KIH) modification, comprising a knob modification in one of the subunits of the Fc domain and a hole modification in the other one of the two subunits of the Fc domain. Any suitable knob-into-hole modifications can be applied to the immunocytokine described herein, such as amino acid changes of T22>Y (creating the knob) in strand B of the first CH3 domain and Y86>T (creating the hole) in strand E of the partner CH3 domain. Also see US20200087414, the content of which is incorporated herein by reference in its entirety. In some embodiments, one subunit of the Fc domain comprises one or more of T350V, L351Y, S400E, F405A, and Y407V mutations relative to a wildtype human IgG1 Fc comprising the sequence of SEQ ID NO: 60, and the other subunit of the Fc domain comprises one or more of T350V, T366L, N390R, K392M, T394W mutations relative to a wildtype human IgG1 Fc comprising the sequence of SEQ ID NO: 60. In some embodiments, one subunit of the Fc domain comprises the sequence of SEQ ID NO: 61, and the other subunit of the Fc domain comprises the sequence of SEQ ID NO: 62.

[0342] In some embodiments, the Fc domain is a single chain Fc domain as described in WO2017134140, the content of which is incorporated herein by reference in its entirety.

### Linkers

[0343] In some embodiments, within the immunocytokine described herein, between the two or more antigen-binding fragments connected in tandem, the antigen-binding fragment (e.g., ligand, receptor, VHH, scFv, or Fab) and the cytokine moiety, the CH1 domain and the cytokine moiety, the two or more cytokine moieties connected in tandem, the two or more subunits of a cytokine or variant thereof connected in tandem, the cytokine moiety and the Fc domain subunit or portion thereof, the hinge region and the CH1 domain, the hinge region and the CH2 domain, the hinge region and the cytokine moiety, the Fc domain subunit or portion thereof and the antigen-binding fragment, and/or the CH1 domain and the Fc domain subunit or portion thereof, are connected via one or more optional linkers (e.g., peptide linker, non-peptide linker). In some embodiments, the one or more linkers are the same. In some embodiments, the one or more linkers are different (e.g., different from each other). In some embodiments, the one or more linkers are flexible linkers. In some embodiments, the one or more linkers are stable linkers. In some embodiments, some of the linkers are flexible, while others are stable. In general, a linker does not affect or significantly affect the proper fold and conformation formed by the configuration of the immunocytokine. Preferably, the linker confers flexibility and spatial space for each portion of the immunocytokine, such as allows target antigen-antigen binding fragment binding, allows ligand-receptor binding, masking cytokine activity in the absence of target antigen-antibody (or ligand-receptor) binding, while unmasking cytokine activity in the presence of target antigen-antibody (or ligand-receptor) binding, providing flexibility and/or sufficient space between two cytokine subunits or two cytokine moieties to ensure proper cytokine activity (binding affinity and/or bioactivity), etc.

[0344] The linkers can be peptide linkers of any length. In some embodiments, the peptide linker is from about 1 amino acid (aa) to about 10 aa long, from about 2 aa to about 15 aa long, from about 3 aa to about 12 aa long, from about 4 aa to about 10 aa long, from about 5 aa to about 9 aa long, from about 6 aa to about 8 aa long, from about 1 amino acid to about 20 aa long, from about 21 aa to about 30 aa long, from about 1 amino acid to about 30 aa long, from about 2 aa to about 20 aa long, from about 10 aa to about 30 aa long, from about 1 amino acid to about 50 aa long, from about 2 aa to about 19 aa long, from about 2 aa to about 18 aa long, from about 2 aa to about 17 aa long, from about 2 aa to about 16 aa long, from about 2 aa to about 10 aa long, from about 2 aa to about 14 aa long, from about 2 aa to about 13 aa long, from about 2 aa to about 12 aa long, from about 2 aa to about 11 aa long, from about 2 aa to about 9 aa long, from about 2 aa to about 8 aa long, from about 2 aa to about 7 aa long, from about 2 aa to about 6 aa long, from about 2 aa to about 5 aa long, or from about 6 aa to about 30 aa long. In some embodiments, the peptide linker is about any of 1, 2, 3, 4, 5, 6, 7, 8, 9, 10, 11, 12, 13, 14, 15, 16, 17, 18, 19 or 20 amino acids long. In some embodiments, the peptide linker is about any of 21, 22, 23, 24, 25, 26, 27, 28, 29, or 30 amino acids long. In some embodiments, the peptide linker is about any of 31, 32, 33, 34, 35, 36, 37, 38, 39, 40, 41, 42, 43, 44, 45, 46, 47, 48, 49, or 50 amino acids long. In some embodiments, the linker is about 10 to about 20 amino acids in length.

[0345] A peptide linker can have a naturally occurring sequence or a non-naturally occurring sequence. For example, a sequence derived from the hinge region of a heavy chain only antibody can be used as a linker. See, for example, WO1996/34103. In some embodiments, the peptide linker is a human IgG1, IgG2, IgG3, or IgG4 hinge or portion thereof. In some embodiments, the peptide linker is a mutated human IgG1, IgG2, IgG3, or IgG4 hinge or portion thereof. In some embodiments, the linker is a flexible linker. Exemplary flexible linkers include, but are not limited to, glycine polymers (G)ₙ(SEQ ID NO: 194), glycine-serine polymers (including, for example, (GS)ₙ(SEQ ID NO: 195), (GGS)ₙ(SEQ ID NO: 196), (GGGS)ₙ(SEQ ID NO: 197), (GGS)ₙ(GGGS)ₙ(SEQ ID NO: 198), (GSGGS)ₙ(SEQ ID NO: 199), (GGSGS)ₙ(SEQ ID NO: 200), or (GGGGS)ₙ(SEQ ID NO: 201), where n is an integer of at least one), glycine-alanine polymers, alanine-serine polymers, and other flexible linkers known in the art. Glycine and glycine-serine polymers are relatively unstructured, and therefore may be able to serve as a neutral tether between components. Glycine accesses significantly more phi-psi space than even alanine and is much less restricted than residues with longer side chains (see Scheraga, Rev.

[0346] Computational Chem. 11 173-142 (1992)). Exemplary flexible linkers include, but are not limited to GG (SEQ ID NO: 202), GSG (SEQ ID NO: 203), GGSG (SEQ ID NO: 204), GGSGG (SEQ ID NO: 205), GSGGGGG (SEQ ID NO: 206), GSGSG (SEQ ID NO: 207), GSGGG (SEQ ID NO: 208), GGGSG (SEQ ID NO: 209), GSSSG (SEQ ID NO: 210), GGSGGS (SEQ ID NO: 211), SGGGGS (SEQ ID NO: 212), GGGGS (SEQ ID NO: 213), (GA)ₙ(SEQ ID NO: 214, n is an integer of at least 1), GRAGGGGAGGGG (SEQ ID NO: 215), GRAGGG (SEQ ID NO: 216), GSGGGSGGGGSGGGGS (SEQ ID NO: 217), GGGSGGGGSGGGGS (SEQ ID NO: 218), GGGSGGSGGS (SEQ ID NO: 219), GGSGGSGGSGGSGGG (SEQ ID NO: 220), GGSGGSGGGGSGGGGS (SEQ ID NO: 221), GGSGGSGGSGGSGGSGGS (SEQ ID NO: 222), GGGGSGGGGSGGGGS (SEQ ID NO: 229), GGGGGGSGGGGSGGGGSA (SEQ ID NO: 223), GSGGGSGGGGSGGGGSGGGGS (SEQ ID NO: 224), KTGGGSGGGS (SEQ ID NO: 225), GGPGGGGSGGGSGGGGS (SEQ ID NO: 226), GGGSGGGGSGGGGSGGGGS (SEQ ID NO: 227), GGGGSGGGGSGGGGSGGGGSG (SEQ ID NO: 228), and the like. In some embodiments, the linker comprises the sequence of ASTKGP (SEQ ID NO: 230). The ordinarily skilled artisan will recognize that design of an immunocytokine can include linkers that are all or partially flexible, such that the linker can include a flexible linker portion as well as one or more portions that confer less flexible structure to provide a desired immunocytokine structure and function (e.g., masking cytokine activity in the absence of target antigen-antibody binding, while unmasking cytokine activity in the presence of target antigen-antibody binding; or providing flexibility and/or sufficient space between two cytokine subunits to ensure proper cytokine activity (binding affinity and/or bioactivity)). In some embodiments, the peptide linker is enriched in serine-glycine. In some embodiments, the peptide linker comprises the amino acid sequence of any one of SEQ ID NOs: 194-242. In some embodiments, the peptide linker comprises (or consists essentially of, or consists of) the amino acid sequence of any of SEQ ID NOs: 227-229. In some embodiments, the cytokine moiety described herein comprises two cytokine subunits (wildtype or mutant) connected by a linker, such as a linker comprising the sequence of any of SEQ ID NOs: 227-229.

[0347] In some embodiments, the linker is a stable linker (e.g., not cleavable by protease, especially MMPs).

[0348] Any one or all of the linkers described herein can be accomplished by any chemical reaction that will connect the antigen-binding fragment (e.g., ligand, receptor, VHH, scFv, or Fab) and the hinge region, the hinge region and the cytokine moiety, the C_{H}1 domain and the cytokine moiety, the cytokine moieties connected in tandem, the cytokine moiety and the Fc domain subunit, between two cytokine subunits, between antigen-binding fragments, between antigen binding fragment and the cytokine moiety, between antigen-binding fragment and Fc domain subunit or portion thereof, and/or the C_{H}1 domain and the Fc domain subunit or portion thereof, so long as the components or fragments retain their respective activities, i.e. binding to cytokine receptor, binding to target antigen(s), binding to ligand or receptor, binding to FcR, or ADCC. This linkage can include many chemical mechanisms, for instance covalent binding, affinity binding, intercalation, coordinate binding and complexation. In some embodiments, the binding is covalent binding. Covalent binding can be achieved either by direct condensation of existing side chains or by the incorporation of external bridging molecules. Many bivalent or polyvalent linking agents are useful in coupling protein molecules. For example, representative coupling agents can include organic compounds such as thioesters, carbodiimides, succinimide esters, diisocyanates, glutaraldehyde, diazobenzenes and hexamethylene diamines. This listing is not intended to be exhaustive of the various classes of coupling agents known in the art but, rather, is exemplary of the more common coupling agents (see Killen and Lindstrom, Jour. Immun. 133:1335-2549 (1984); Jansen et al., Immunological Reviews 62:185-216 (1982); and Vitetta et al., Science 238:1098 (1987)).

[0349] Linkers that can be applied in the present application are described in the literature (see, for example, Ramakrishnan, S. et al., Cancer Res. 44:201-208 (1984) describing use of MBS (M-maleimidobenzoyl-N-hydroxysuccinimide ester)). In some embodiments, non-peptide linkers used herein include: (i) EDC (1-ethyl-3-(3-dimethylamino-propyl) carbodiimide hydrochloride; (ii) SMPT (4-succinimidyloxycarbonyl-alpha-methyl-alpha-(2-pridyl-dithio)-toluene (Pierce Chem. Co., Cat. (21558G); (iii) SPDP (succinimidyl-6 [3-(2-pyridyldithio) propionamido]hexanoate (Pierce Chem. Co., Cat #21651G); (iv) Sulfo-LC-SPDP (sulfosuccinimidyl 6 [3-(2-pyridyldithio)-propianamide] hexanoate (Pierce Chem. Co. Cat. #2165-G); and (v) sulfo-NHS (N-hydroxysulfo-succinimide: Pierce Chem. Co., Cat. #24510) conjugated to EDC.

[0350] The linkers described above can contain components that have different attributes, thus leading to immunocytokines with differing physio-chemical properties. For example, sulfo-NHS esters of alkyl carboxylates are more stable than sulfo-NHS esters of aromatic carboxylates.

[0351] NHS-ester containing linkers are less soluble than sulfo-NHS esters. Further, the linker SIPT contains a sterically hindered disulfide bond, and can form fusion protein with increased stability. Disulfide linkages, are in general, less stable than other linkages because the disulfide linkage is cleaved in vitro, resulting in less fusion protein available. Sulfo-NHS, in particular, can enhance the stability of carbodiimide couplings. Carbodiimide couplings (such as EDC) when used in conjunction with sulfo-NHS, forms esters that are more resistant to hydrolysis than the carbodiimide coupling reaction alone.

[0352] Other linker considerations include the effect on physical or pharmacokinetic properties of the resulting immunocytokine, such as solubility, lipophilicity, hydrophilicity, hydrophobicity, stability (more or less stable as well as planned degradation), rigidity, flexibility, immunogenicity, modulation of cytokine moiety/cytokine receptor binding, modulation of antigen-binding domain/target antigen binding, modulation of ligand-receptor binding, the ability to be incorporated into a micelle or liposome, and the like.

### Immunocytokine Variants

[0353] Glycosylation Variants

[0354] In some embodiments, the immunocytokine is altered to increase or decrease the extent to which the construct is glycosylated. Addition or deletion of glycosylation sites to an Fc domain may be conveniently accomplished by altering the amino acid sequence such that one or more glycosylation sites is created or removed.

[0355] Native antibodies produced by mammalian cells typically comprise a branched, biantennary oligosaccharide that is generally attached by an N-linkage to Asn297 of the C_{H}2 domain of the Fc region. See, e.g., Wright et al. TIBTECH 15:26-32 (1997). The oligosaccharide may include various carbohydrates, e.g., mannose, N-acetyl glucosamine (GlcNAc), galactose, and sialic acid, as well as a fucose attached to a GlcNAc in the “stem” of the biantennary oligosaccharide structure. In some embodiments, modifications of the oligosaccharide in an Fc domain may be made in order to create certain improved properties.

[0356] In some embodiments, the immunocytokine described herein is provided having a carbohydrate structure that lacks fucose attached (directly or indirectly) to the Fc domain. For example, the amount of fucose in such immunocytokine may be from 1% to 80%, from 1% to 65%, from 5% to 65% or from 20% to 40%. The amount of fucose is determined by calculating the average amount of fucose within the sugar chain at Asn297, relative to the sum of all glycostructures attached to Asn 297 (e.g., complex, hybrid and high mannose structures) as measured by MALDI-TOF mass spectrometry, as described in WO 2008/077546, for example. Asn297 refers to the asparagine residue located at about position 297 in the Fc domain (EU numbering of Fc region residues); however, Asn297 may also be located about +3 amino acids upstream or downstream of position 297, i.e., between positions 294 and 300, due to minor sequence variations in antibodies. Such fucosylation variants may have improved ADCC function.

[0357] See, e.g., US Patent Publication Nos. US 2003/0157108 (Presta, L.); US 2004/0093621 (Kyowa Hakko Kogyo Co., Ltd). Examples of publications related to “defucosylated” or “fucose-deficient” antibody variants include: US 2003/0157108; WO 2000/61739; WO 2001/29246; US 2003/0115614; US 2002/0164328; US 2004/0093621; US 2004/0132140; US 2004/0110704; US 2004/0110282; US 2004/0109865; WO 2003/085119; WO 2003/084570; WO 2005/035586; WO 2005/035778; WO2005/053742; WO2002/031140; Okazaki et al. J. Mol. Biol. 336:1239-1249 (2004); Yamane-Ohnuki et al. Biotech. Bioeng. 87: 614 (2004). Examples of cell lines capable of producing defucosylated antibodies include Lec13 CHO cells deficient in protein fucosylation (Ripka et al. Arch. Biochem. Biophys. 249:533-545 (1986); US Patent Application No. US 2003/0157108 A1, Presta, L; and WO 2004/056312 A1, Adams et al., especially at Example 11), and knockout cell lines, such as alpha-1,6-fucosyltransferase gene, FUT8, knockout CHO cells (see, e.g., Yamane-Ohnuki et al. Biotech. Bioeng. 87: 614 (2004); Kanda, Y. et al., Biotechnol. Bioeng., 94(4):680-688 (2006); and WO2003/085107).

[0358] Effector Function Variants

[0359] In some embodiments, the present application contemplates an immunocytokine that possesses some but not all Fc effector functions, which makes it a desirable candidate for applications in which the half-life of the immunocytokine in vivo is important yet certain effector functions (such as CDC and ADCC) are unnecessary or deleterious. Some of the Fc domain variants have been discussed above. In vitro and/or in vivo cytotoxicity assays can be conducted to confirm the reduction/depletion of CDC and/or ADCC activities. For example, Fc receptor (FcR) binding assays can be conducted to ensure that the antibody lacks FcγR binding (hence likely lacking ADCC activity), but retains FcRn binding ability. The primary cells for mediating ADCC, NK cells, express FcγRIII only, whereas monocytes express FcγRI, FcγRII and FcγRIII. FcR expression on hematopoietic cells is summarized in Table 2 on page 464 of Ravetch and Kinet, Annu. Rev. Immunol. 9:457-492 (1991). Non-limiting examples of in vitro assays to assess ADCC activity of a molecule of interest is described in U.S. Pat. No. 5,500,362 (see, e.g. Hellstrom, I. et al. Proc. Nat'l Acad. Sci. USA 83:7059-7063 (1986)) and Hellstrom, I et al., Proc. Nat'l Acad.

[0360] Sci. USA 82:1499-1502 (1985); 5,821,337 (see Bruggemann, M. et al., J. Exp. Med. 166:1351-1361 (1987)). Alternatively, non-radioactive assays methods may be employed (see, for example, ACTI™ non-radioactive cytotoxicity assay for flow cytometry (CellTechnology, Inc. Mountain View, CA; and CytoTox 96® non-radioactive cytotoxicity assay (Promega, Madison, WI). Useful effector cells for such assays include peripheral blood mononuclear cells (PBMC) and Natural Killer (NK) cells. Alternatively, or additionally, ADCC activity of the molecule of interest may be assessed in vivo, e.g., in an animal model such as that disclosed in Clynes et al. Proc. Nat'l Acad. Sci. USA 95:652-656 (1998). Clq binding assays may also be carried out to confirm that the antibody is unable to bind Clq and hence lacks CDC activity. See, e.g., Clq and C3c binding ELISA in WO 2006/029879 and WO 2005/100402. To assess complement activation, a CDC assay may be performed (see, for example, Gazzano-Santoro et al., J. Immunol. Methods 202:163 (1996); Cragg, M. S. et al., Blood 101:1045-1052 (2003); and Cragg, M.S. and M.J. Glennie, Blood 103:2738-2743 (2004)). FcRn binding and in vivo clearance/half-life determinations can also be performed using methods known in the art (see, e.g., Petkova, S. B. et al., Int'l. Immunol. 18(12):1759-1769 (2006)).

[0361] Fc domains with reduced effector function include those with substitution of one or more of Fc region residues 238, 265, 269, 270, 297, 327 and 329 (U.S. Pat. No. 6,737,056). Such Fc mutants include substitutions at two or more of amino acid positions 265, 269, 270, 297 and 327, including the so-called “DANA” Fc mutant with substitution of residues 265 and 297 to alanine (U.S. Pat. No. 7,332,581). Certain antibody variants with improved or diminished binding to FcRs are described (see, e.g., U.S. Pat. No. 6,737,056; WO 2004/056312, and Shields et al., J. Biol. Chem. 9(2): 6591-6604 (2001)). In some embodiments, alterations are made in the Fc domain that result in altered (i.e., either improved or diminished) Clq binding and/or CDC, e.g., as described in U.S. Pat. No. 6,194,551, WO 99/51642, and Idusogie et al. J. Immunol. 164: 4178-4184 (2000).

[0362] In some embodiments, the Fc domain comprises one or more amino acid substitutions, which increase half-life and/or improve binding to the neonatal Fc receptor (FcRn). Antibodies with increased half-lives and improved binding to the neonatal Fc receptor (FcRn), which is responsible for the transfer of maternal IgGs to the fetus (Guyer et al., J. Immunol. 117:587 (1976) and Kim et al., J. Immunol. 24:249 (1994)), are described in US2005/0014934A1 (Hinton et al.). Those antibodies comprise an Fc domain with one or more substitutions therein which improve binding of the Fc region to FcRn. Such Fc variants include those with substitutions at one or more of Fc region residues, e.g., substitution of Fc region residue 434 (U.S. Pat. No. 7,371,826).

[0363] See also Duncan & Winter, Nature 322:738-40 (1988); U.S. Pat. Nos. 5,648,260; 5,624,821; and WO 94/29351 concerning other examples of Fc domain variants.

[0364] Cysteine Engineered Variants

[0365] In some embodiments, it may be desirable to create cysteine-engineered immunocytokines, e.g., “thioMAbs,” in which one or more residues of an immunocytokine are substituted with cysteine residues. In particular, embodiments, the substituted residues occur at accessible sites of the immunocytokine. By substituting those residues with cysteine, reactive thiol groups are thereby positioned at accessible sites of the immunocytokine and may be used to conjugate the immunocytokine to other moieties, such as drug moieties or linker-drug moieties, to create an immunocytokine-conjugate. In some embodiments, any one or more of the following residues may be substituted with cysteine: A1 18 (EU numbering) of the heavy chain; and S400 (EU numbering) of the heavy chain Fc domain. Cysteine engineered immunocytokines may be generated as described, e.g., in U.S. Pat. No. 7,521,541.

[0366] Immunocytokine Derivatives

[0367] In some embodiments, immunocytokines provided herein may further comprise an additional therapeutic compound, such as any therapeutic compounds known in the art. For example, the parental antibody in some embodiments can be an antibody drug conjugate (ADC).

[0368] See, e.g., any ADC described in Shim H. (Biomolecules. 2020 March; 10(3): 360), and Diamantis N. and Banerji U. Br J Cancer. 2016; 114(4): 362-367, the contents of which are incorporated herein by reference in their entirety. In some embodiments, the therapeutic compound is conjugated to the Fc domain or portion thereof. In some embodiments, the therapeutic compound is a cytotoxic agent, a chemotherapeutic agent, a growth inhibitory agent, or an antibiotic.

[0369] In some embodiments, the immunocytokine further comprises a label selected from the group consisting of a chromophore, a fluorophore (e.g., coumarin, a xanthene, a cyanine, a pyrene, a borapolyazaindacene, an oxazine, and derivatives thereof), a fluorescent protein (e.g., GFP, phycobiliproteins, and derivatives thereof), a phosphorescent dye (e.g., dioxetanes, xanthene, or carbocyanine dyes, lanthanide chelates), a tandem dye (e.g., cyanine-phycobiliprotein derivative and xanthene-phycobiliprotein derivative), a particle (e.g., gold clusters, colloidal gold, microspheres, quantum dots), a hapten, an enzyme (e.g., peroxidase, a phosphatase, a glycosidase, a luciferase), and a radioisotope (e.g., ¹²⁵, ³H, ⁴C, ³²P)

### III. Vectors Encoding Immunocytokines

[0370] The present invention also provides isolated nucleic acids encoding any of the immunocytokines described herein (e.g., IL-2/anti-HER2 immunocytokine, IL-2/anti-CD3 immunocytokine, IL-2/anti-PD-1 immunocytokine, IL-2/anti-CD4 immunocytokine, IL-2/anti-CD8 immunocytokine, IL-2/anti-CTLA-4 immunocytokine, IL-2/anti-PD-L1 immunocytokine, IL-2/anti-CD25 immunocytokine, IL-2/PD-L2-Fc immunocytokine, IL-12/anti-HER2 immunocytokine, IL-12/anti-CD3 immunocytokine, IL-12/anti-PD-1 immunocytokine, IL-12/anti-CD4 immunocytokine, IL-12/anti-CD8 immunocytokine, IL-12/anti-CTLA-4 immunocytokine, IL-12/anti-PD-L1 immunocytokine, IL-12/anti-CD25 immunocytokine, IL-12/PD-L2-Fc immunocytokine, IL-23/anti-HER2 immunocytokine, IL-23/anti-CD3 immunocytokine, IL-23/anti-PD-1 immunocytokine, IL-23/anti-CD4 immunocytokine, IL-23/anti-CD8 immunocytokine, IL-23/anti-CTLA-4 immunocytokine, IL-23/anti-PD-L1 immunocytokine, IL-23/anti-CD25 immunocytokine, IL-23/PD-L2-Fc immunocytokine, IL-10/anti-HER2 immunocytokine, IL-10/anti-CD3 immunocytokine, IL-10/anti-PD-1 immunocytokine, IL-10/anti-CD4 immunocytokine, IL-10/anti-CD8 immunocytokine, IL-10/anti-CTLA-4 immunocytokine, IL-10/anti-PD-L1 immunocytokine, IL-10/anti-CD25 immunocytokine, IL-10/PD-L2-Fc immunocytokine, IFN-γ/anti-HER2 immunocytokine, IFN-γ/anti-CD3 immunocytokine, IFN-γ/anti-PD-1 immunocytokine, IFN-γ/anti-CD4 immunocytokine, IFN-γ/anti-CD8 immunocytokine, IFN-γ/anti-CTLA-4 immunocytokine, IFN-γ/anti-PD-L1 immunocytokine, IFN-γ/anti-CD25 immunocytokine, IFN-γ/PD-L2-Fc immunocytokine, IFN-α/anti-HER2 immunocytokine, IFN-α/anti-CD3 immunocytokine, IFN-α/anti-PD-1 immunocytokine, IFN-α/anti-CD4 immunocytokine, IFN-α/anti-CD8 immunocytokine, IFN-α/anti-CTLA-4 immunocytokine, IFN-α/anti-PD-L1 immunocytokine, IFN-α/anti-CD25 immunocytokine, or IFN-α/PD-L2-Fc immunocytokine), vectors comprising nucleic acids encoding any of the immunocytokines described herein. Also provided are isolated host cells (e.g., CHO cells, HEK 293 cells, Hela cells, COS cells) comprising nucleic acids encoding any of the immunocytokines described herein, or vectors comprising nucleic acids encoding any of the immunocytokines described herein.

[0371] Thus in some embodiments, there is provided an isolated nucleic acid encoding an immunocytokine comprising: a) an antigen-binding protein (e.g., antibody such as full-length antibody, or antigen-binding fragment-hinge-Fc fusion protein such as ligand/receptor-hinge-Fc fusion protein) specifically recognizing a target antigen (e.g., CTLA-4, PD-L1, PD-L2, CD25, HER2, PD-1, CD3, CD4, CD123, or CD8); and b) a cytokine (e.g., IL-2, IFN-α (e.g., IFN-α2b), IFN-γ, IL-10, IL-12, or IL-23) or variant thereof, wherein the antigen-binding protein comprises an antigen-binding polypeptide (e.g., antibody heavy chain, or antigen-binding fragment-hinge-Fc fusion polypeptide such as ligand/receptor-hinge-Fc fusion polypeptide) comprising from N′ to C′: an antigen-binding fragment (e.g., ligand such as PD-L2, receptor, VHH, scFv, or VH), a hinge region, and an Fc domain subunit or portion thereof (e.g., CH2+CH3, or CH2 only), and wherein the cytokine or variant thereof is positioned at (e.g., at the N′ of, at the C′ of, or within) the hinge region. In some embodiments, there is provided an isolated nucleic acid encoding an immunocytokine comprising: a) an antibody (e.g., full-length antibody, heavy chain only antibody, or antigen-binding fragment fused to an Fc domain subunit or portion thereof) specifically recognizing a target antigen (e.g., CTLA-4, PD-L1, PD-L2, CD25, CD123, HER2, PD-1, CD3, CD4, or CD8); and b) a cytokine (e.g., IL-2, IFN-α (e.g., IFN-α2b), IFN-γ, IL-10, IL-12, or IL-23) or variant thereof, wherein the antibody comprises a heavy chain comprising a hinge region, and wherein the cytokine or variant thereof is positioned at the hinge region (e.g., within the hinge region, or between the C-terminus of CH1 and the N-terminus of the hinge region) of the heavy chain. In some embodiments, there is provided an isolated nucleic acid encoding an immunocytokine comprising: a) an antibody specifically recognizing a target antigen (e.g., CTLA-4, PD-L1, PD-L2, CD25, CD123, HER2, PD-1, CD3, CD4, or CD8); and b) a cytokine (e.g., IL-2, IFN-α (e.g., IFN-α2b), IFN-γ, IL-10, IL-12, or IL-23) or variant thereof, wherein the antibody comprises a heavy chain comprising from N-terminus to C-terminus: a VH domain, optionally a CH1 domain, the cytokine or variant thereof at a hinge region, a CH2 domain, and optionally a CH3 domain. In some embodiments, there is provided an isolated nucleic acid encoding an immunocytokine comprising: a) a full-length antibody specifically recognizing a target antigen (e.g., CTLA-4, PD-L1, PD-L2, CD25, CD123, HER2, PD-1, CD3, CD4, or CD8); and b) a cytokine (e.g., IL-2, IFN-α (e.g., IFN-α2b), IFN-γ, IL-10, IL-12, or IL-23) or variant thereof, wherein the cytokine or variant thereof is positioned at the hinge region (e.g., within the hinge region, or between the C-terminus of CH1 and the N-terminus of the hinge region) of a heavy chain of the full-length antibody. In some embodiments, each polypeptide of the immunocytokine is encoded by a single isolated nucleic acid. In some embodiments, one isolated nucleic acid encode two or more polypeptides of the immunocytokine.

[0372] In some embodiments, the vector comprising a nucleic acid encoding any of the immunocytokines described herein is suitable for replication and integration in eukaryotic cells, such as mammalian cells (e.g., CHO cells, HEK 293 cells, Hela cells, COS cells). In some embodiments, the vector is a viral vector. Examples of viral vectors include, but are not limited to, adenoviral vectors, adeno-associated virus vectors, lentiviral vector, retroviral vectors, herpes simplex viral vector, and derivatives thereof. Viral vector technology is well known in the art and is described, for example, in Sambrook et al. (2001, Molecular Cloning: A Laboratory Manual, Cold Spring Harbor Laboratory, New York), and in other virology and molecular biology manuals.

[0373] A number of viral based systems have been developed for gene transfer into mammalian cells. For example, retroviruses provide a convenient platform for gene delivery systems. The heterologous nucleic acid can be inserted into a vector and packaged in retroviral particles using techniques known in the art. The recombinant virus can then be isolated and delivered to the engineered mammalian cell in vitro or ex vivo. A number of retroviral systems are known in the art. In some embodiments, adenovirus vectors are used. A number of adenovirus vectors are known in the art. In some embodiments, lentivirus vectors are used. In some embodiments, self-inactivating lentiviral vectors are used. For example, self-inactivating lentiviral vectors carrying the immunocytokine coding sequence(s) can be packaged with protocols known in the art. The resulting lentiviral vectors can be used to transduce a mammalian cell using methods known in the art. Vectors derived from retroviruses such as lentivirus are suitable tools to achieve long-term gene transfer, because they allow long-term, stable integration of a transgene and its propagation in progeny cells. Lentiviral vectors also have low immunogenicity, and can transduce non-proliferating cells.

[0374] In some embodiments, the vector is a non-viral vector. In some embodiments, the vector is a transposon, such as a Sleeping Beauty (SB) transposon system, or a PiggyBac transposon system. In some embodiments, the vector is a polymer-based non-viral vector, including for example, poly (lactic-co-glycolic acid) (PLGA) and poly lactic acid (PLA), poly (ethylene imine) (PEI), and dendrimers. In some embodiments, the vector is a cationic-lipid based non-viral vector, such as cationic liposome, lipid nanoemulsion, and solid lipid nanoparticle (SLN). In some embodiments, the vector is a peptide-based gene non-viral vector, such as poly-L-lysine. Any of the known non-viral vectors suitable for genome editing can be used for introducing the immunocytokine-encoding nucleic acid(s) to the host cells. See, for example, Yin H. et al. Nature Rev. Genetics (2014) 15:521-555; Aronovich E L et al. “The Sleeping Beauty transposon system: a non-viral vector for gene therapy.” Hum. Mol. Genet. (2011) R1: R14-20; and Zhao S. et al. “PiggyBac transposon vectors: the tools of the human gene editing.” Transl. Lung Cancer Res. (2016) 5(1): 120-125, which are incorporated herein by reference. In some embodiments, any one or more of the nucleic acids or vectors encoding the immunocytokines described herein is introduced to the host cells (e.g., CHO, HEK 293, Hela, or COS) by a physical method, including, but not limited to electroporation, sonoporation, photoporation, magnetofection, hydroporation.

[0375] In some embodiments, the vector contains a selectable marker gene or a reporter gene to select cells expressing the immunocytokines described herein from the population of host cells transfected through vectors (e.g., lentiviral vectors). Both selectable markers and reporter genes may be flanked by appropriate regulatory sequences to enable expression in the host cells. For example, the vector may contain transcription and translation terminators, initiation sequences, and promoters useful for regulation of the expression of the nucleic acid sequences.

[0376] In some embodiments, the vector (e.g., viral vector) comprises any one of the nucleic acids encoding the immunocytokines described herein. The nucleic acid can be cloned into the vector using any known molecular cloning methods in the art, including, for example, using restriction endonuclease sites and one or more selectable markers. In some embodiments, the nucleic acid is operably linked to a promoter. Varieties of promoters have been explored for gene expression in mammalian cells, and any of the promoters known in the art may be used in the present invention. Promoters may be roughly categorized as constitutive promoters or regulated promoters, such as inducible promoters.

[0377] In some embodiments, the nucleic acid encoding the immunocytokines described herein is operably linked to a constitutive promoter. Constitutive promoters allow heterologous genes (also referred to as transgenes) to be expressed constitutively in the host cells. Exemplary promoters contemplated herein include, but are not limited to, cytomegalovirus immediate-early promoter (CMV), human elongation factors-1alpha (hEF1α), ubiquitin C promoter (UbiC), phosphoglycerokinase promoter (PGK), simian virus 40 early promoter (SV40), chicken β-Actin promoter coupled with CMV early enhancer (CAGG), a Rous Sarcoma Virus (RSV) promoter, a polyoma enhancer/herpes simplex thymidine kinase (MC1) promoter, a beta actin (β-ACT) promoter, a “myeloproliferative sarcoma virus enhancer, negative control region deleted, d1587rev primer-binding site substituted (MND)” promoter. The efficiencies of such constitutive promoters on driving transgene expression have been widely compared in a huge number of studies. In some embodiments, the nucleic acid encoding the immunocytokines described herein is operably linked to a CMV promoter.

[0378] In some embodiments, the nucleic acid encoding the immunocytokines described herein is operably linked to an inducible promoter. Inducible promoters belong to the category of regulated promoters. The inducible promoter can be induced by one or more conditions, such as a physical condition, microenvironment of the host cells, or the physiological state of the host cells, an inducer (i.e., an inducing agent), or a combination thereof. In some embodiments, the inducing condition does not induce the expression of endogenous genes in the host cell. In some embodiments, the inducing condition is selected from the group consisting of: inducer, irradiation (such as ionizing radiation, light), temperature (such as heat), redox state, and the activation state of the host cell. In some embodiments, the inducible promoter can be an NFAT promoter, a TETON® promoter, or an NFxB promoter. In some embodiments, the inducible promoter is a tet-inducible promoter.

[0379] In some embodiments, the vector comprises more than one nucleic acids encoding the immunocytokines described herein, e.g., different polypeptides of the immunocytokine. In some embodiments, each vector comprises 2 nucleic acids encoding 2 polypeptides of the immunocytokines described herein.

[0380] In some embodiments, the two or more nucleic acids encoding the immunocytokines described herein are operably regulated under the same promoter in the vector. In some embodiments, the two or more nucleic acids are linked in tandem via a linking sequence (e.g., IRES) or a nucleic acid sequence encoding a self-cleaving 2A peptide, such as P2A, T2A, E2A, F2A, BmCPV 2A, BmIFV 2A. In some embodiments, the nucleic acid encoding two or more polypeptides of the immunocytokines comprises linking sequence(s) (e.g., IRES) or nucleic acid sequence(s) encoding self-cleaving 2A peptide(s) (such as P2A, T2A, E2A, F2A, BmCPV 2A, BmIFV 2A) between the polypeptide encoding sequences. In some embodiments, the two or more nucleic acids encoding the immunocytokines described herein are operably regulated under separate promoters in the vector. In some embodiments, the promoters operably linked to each nucleic acid are different. In some embodiments, the promoters operably linked to each nucleic acid are the same. In some embodiments, the immunocytokine described herein is encoded by two or more vectors, e.g., each vector encodes one heavy chain (or one polypeptide comprising V_{H} and cytokine moiety) and one pairing light chain, or each vector encodes one polypeptide of the immunocytokine.

### IV. Methods of Preparation

[0381] Also provided are methods of preparing any of the immunocytokines described herein (e.g., IL-2/anti-HER2 immunocytokine, IL-2/anti-CD3 immunocytokine, IL-2/anti-PD-1 immunocytokine, IL-2/anti-CD4 immunocytokine, IL-2/anti-CD8 immunocytokine, IL-2/anti-CTLA-4 immunocytokine, IL-2/anti-PD-L1 immunocytokine, IL-2/anti-CD25 immunocytokine, IL-2/PD-L2-Fc immunocytokine, IL-12/anti-HER2 immunocytokine, IL-12/anti-CD3 immunocytokine, IL-12/anti-PD-1 immunocytokine, IL-12/anti-CD4 immunocytokine, IL-12/anti-CD8 immunocytokine, IL-12/anti-CTLA-4 immunocytokine, IL-12/anti-PD-L1 immunocytokine, IL-12/anti-CD25 immunocytokine, IL-12/PD-L2-Fc immunocytokine, IL-23/anti-HER2 immunocytokine, IL-23/anti-CD3 immunocytokine, IL-23/anti-PD-1 immunocytokine, IL-23/anti-CD4 immunocytokine, IL-23/anti-CD8 immunocytokine, IL-23/anti-CTLA-4 immunocytokine, IL-23/anti-PD-L1 immunocytokine, IL-23/anti-CD25 immunocytokine, IL-23/PD-L2-Fc immunocytokine, IL-10/anti-HER2 immunocytokine, IL-10/anti-CD3 immunocytokine, IL-10/anti-PD-1 immunocytokine, IL-10/anti-CD4 immunocytokine, IL-10/anti-CD8 immunocytokine, IL-10/anti-CTLA-4 immunocytokine, IL-10/anti-PD-L1 immunocytokine, IL-10/anti-CD25 immunocytokine, IL-10/PD-L2-Fc immunocytokine, IFN-γ/anti-HER2 immunocytokine, IFN-γ/anti-CD3 immunocytokine, IFN-γ/anti-PD-1 immunocytokine, IFN-γ/anti-CD4 immunocytokine, IFN-γ/anti-CD8 immunocytokine, IFN-γ/anti-CTLA-4 immunocytokine, IFN-γ/anti-PD-L1 immunocytokine, IFN-γ/anti-CD25 immunocytokine, IFN-γ/PD-L2-Fc immunocytokine, IFN-α/anti-HER2 immunocytokine, IFN-α/anti-CD3 immunocytokine, IFN-α/anti-PD-1 immunocytokine, IFN-α/anti-CD4 immunocytokine, IFN-α/anti-CD8 immunocytokine, IFN-α/anti-CTLA-4 immunocytokine, IFN-α/anti-PD-L1 immunocytokine, IFN-α/anti-CD25 immunocytokine, or IFN-α/PD-L2-Fc immunocytokine). Thus, in some embodiments, there is provided a method of producing an immunocytokine, comprising: (a) culturing a host cell (e.g., CHO cell, HEK 293 cell, Hela cell, or COS cell) comprising any of the nucleic acids or vectors encoding the immunocytokines described herein under a condition effective to express the encoded immunocytokine; and (b) obtaining the expressed immunocytokine from said host cell. In some embodiments, the method of step (a) further comprises producing a host cell comprising the nucleic acid or vector encoding the immunocytokine described herein. The immunocytokine described herein may be prepared using any methods known in the art or as described herein. Also see Examples 1, 4, 5, 7, 9, 10, and 12 for exemplary methods. In some embodiments, the immunocytokines is expressed with eukaryotic cells, such as mammalian cells. In some embodiments, the immunocytokines is expressed with prokaryotic cells.

### 1. Recombinant Production in Prokaryotic Cells

### a) Vector Construction

[0382] Polynucleic acid sequences encoding the immunocytokines of the present application can be obtained using standard recombinant techniques. Desired polynucleic acid sequences may be isolated and sequenced from antibody or immunocytokine producing cells such as hybridoma cells. Alternatively, polynucleotides can be synthesized using nucleotide synthesizer or PCR techniques. Once obtained, sequences encoding the polypeptides are inserted into a recombinant vector capable of replicating and expressing heterologous polynucleotides in prokaryotic hosts. Many vectors that are available and known in the art can be used for the purpose of the present invention. Selection of an appropriate vector will depend mainly on the size of the nucleic acids to be inserted into the vector and the particular host cell to be transformed with the vector. Each vector contains various components, depending on its function (amplification or expression of heterologous polynucleotide, or both) and its compatibility with the particular host cell in which it resides. The vector components generally include, but are not limited to: an origin of replication, a selection marker gene, a promoter, a ribosome binding site (RBS), a signal sequence, the heterologous nucleic acid insert and a transcription termination sequence.

[0383] In general, plasmid vectors containing replicon and control sequences which are derived from species compatible with the host cell are used in connection with these hosts. The vector ordinarily carries a replication site, as well as marking sequences which are capable of providing phenotypic selection in transformed cells. For example, E. coli is typically transformed using pBR322, a plasmid derived from an E. coli species. pBR322 contains genes encoding ampicillin (Amp) and tetracycline (Tet) resistance and thus provides easy means for identifying transformed cells. pBR322, its derivatives, or other microbial plasmids or bacteriophage may also contain, or be modified to contain, promoters which can be used by the microbial organism for expression of endogenous proteins. Examples of pBR322 derivatives used for expression of particular antibodies are described in detail in Carter et al., U.S. Pat. No. 5,648,237.

[0384] In addition, phage vectors containing replicon and control sequences that are compatible with the host microorganism can be used as transforming vectors in connection with these hosts. For example, bacteriophage such as GEM™-11 may be utilized in making a recombinant vector, which can be used to transform susceptible host cells such as E. coli LE392.

[0385] The expression vector of the present application may comprise two or more promoter-cistron pairs, encoding each of the polypeptide components. A promoter is an untranslated regulatory sequence located upstream (5′) to a cistron that modulates its expression. Prokaryotic promoters typically fall into two classes, inducible and constitutive. Inducible promoter is a promoter that initiates increased levels of transcription of the cistron under its control in response to changes in the culture condition, e.g., the presence or absence of a nutrient or a change in temperature.

[0386] A large number of promoters recognized by a variety of potential host cells are well known. The selected promoter can be operably linked to cistron DNA encoding the polypeptide by removing the promoter from the source DNA via restriction enzyme digestion and inserting the isolated promoter sequence into the vector of the present application. Both the native promoter sequence and many heterologous promoters may be used to direct amplification and/or expression of the target genes. In some embodiments, heterologous promoters are utilized, as they generally permit greater transcription and higher yields of expressed target gene as compared to the native target polypeptide promoter.

[0387] Promoters suitable for use with prokaryotic hosts include the PhoA promoter, the —galactamase and lactose promoter systems, a tryptophan (trp) promoter system and hybrid promoters such as the tac or the trc promoter. However, other promoters that are functional in bacteria (such as other known bacterial or phage promoters) are suitable as well. Their nucleic acid sequences have been published, thereby enabling a skilled worker operably to ligate them to cistrons encoding the target light and heavy chains (Siebenlist et al. (1980) Cell 20: 269) using linkers or adaptors to supply any required restriction sites.

[0388] In some embodiments, each cistron within the recombinant vector comprises a secretion signal sequence component that directs translocation of the expressed polypeptides across a membrane. In general, the signal sequence may be a component of the vector, or it may be a part of the target polypeptide DNA that is inserted into the vector. The signal sequence selected for the purpose of this invention should be one that is recognized and processed (i.e., cleaved by a signal peptidase) by the host cell. For prokaryotic host cells that do not recognize and process the signal sequences native to the heterologous polypeptides, the signal sequence is substituted by a prokaryotic signal sequence selected, for example, from the group consisting of the alkaline phosphatase, penicillinase, Ipp, or heat-stable enterotoxin II (STII) leaders, LamB, PhoE, PelB, OmpA and MBP. In some embodiments of the present application, the signal sequences used in both cistrons of the expression system are STII signal sequences or variants thereof.

[0389] In some embodiments, the production of the immunocytokine according to the present application can occur in the cytoplasm of the host cell, and therefore does not require the presence of secretion signal sequences within each cistron. In some embodiments, polypeptide components are expressed, folded, and assembled to form an immunocytokine (or portion of the immunocytokine) within the cytoplasm. Certain host strains (e.g., the E. coli trxB⁻ strains) provide cytoplasm conditions that are favorable for disulfide bond formation, thereby permitting proper folding and assembly of expressed protein subunits. See Proba and Pluckthun, Gene, 159:203 (1995).

[0390] The present invention provides an expression system in which the quantitative ratio of expressed polypeptide components can be modulated in order to maximize the yield of secreted and properly assembled immunocytokines of the present application. Such modulation is accomplished at least in part by simultaneously modulating translational strengths for the polypeptide components. One technique for modulating translational strength is disclosed in Simmons et al., U.S. Pat. No. 5,840,523. It utilizes variants of the translational initiation region (TIR) within a cistron. For a given TIR, a series of amino acid or nucleic acid sequence variants can be created with a range of translational strengths, thereby providing a convenient means by which to adjust this factor for the desired expression level of the specific chain. TIR variants can be generated by conventional mutagenesis techniques that result in codon changes which can alter the amino acid sequence, although silent changes in the nucleic acid sequence are preferred. Alterations in the TIR can include, for example, alterations in the number or spacing of Shine-Dalgarno sequences, along with alterations in the signal sequence. One method for generating mutant signal sequences is the generation of a “codon bank” at the beginning of a coding sequence that does not change the amino acid sequence of the signal sequence (i.e., the changes are silent). This can be accomplished by changing the third nucleotide position of each codon; additionally, some amino acids, such as leucine, serine, and arginine, have multiple first and second positions that can add complexity in making the bank. This method of mutagenesis is described in detail in Yansura et al. (1992) METHODS: A Companion to Methods in Enzymol. 4:151-158.

[0391] Preferably, a set of vectors is generated with a range of TIR strengths for each cistron therein. This limited set provides a comparison of expression levels of each chain as well as the yield of the desired protein products under various TIR strength combinations. TIR strengths can be determined by quantifying the expression level of a reporter gene as described in detail in Simmons et al. U.S. Pat. No. 5,840,523. Based on the translational strength comparison, the desired individual TIRs are selected to be combined in the expression vector constructs of the present application.

### b) Prokaryotic Host Cells

[0392] Prokaryotic host cells suitable for expressing the immunocytokines of the present application include Archaebacteria and Eubacteria, such as Gram-negative or Gram-positive organisms. Examples of useful bacteria include Escherichia (e.g., E. coli), Bacilli (e.g., B. subtilis), Enterobacteria, Pseudomonas species (e.g., P. aeruginosa), Salmonella typhimurium, Serratia marcescans, Klebsiella, Proteus, Shigella, Rhizobia, Vitreoscilla, or Paracoccus. In some embodiments, gram-negative cells are used. In some embodiments, E. coli cells are used as hosts for the invention. Examples of E. coli strains include strain W3110 (Bachmann, Cellular and Molecular Biology, vol. 2 (Washington, D.C.: American Society for Microbiology, 1987), pp. 1190-1219; ATCC Deposit No. 27,325) and derivatives thereof, including strain 33D3 having genotype W3110 AfhuA (AtonA) ptr3 lac Iq lacL8 AompT A(nmpc-fepE) degP41 kan^{R} (U.S. Pat. No. 5,639,635). Other strains and derivatives thereof, such as E. coli 294 (ATCC 31,446), E. coli B, E. coli 1776 (ATCC 31,537) and E. coli RV308 (ATCC 31,608) are also suitable. These examples are illustrative rather than limiting. Methods for constructing derivatives of any of the above-mentioned bacteria having defined genotypes are known in the art and described in, for example, Bass et al., Proteins, 8:309-314 (1990). It is generally necessary to select the appropriate bacteria taking into consideration replicability of the replicon in the cells of a bacterium. For example, E. coli, Serratia, or Salmonella species can be suitably used as the host when well-known plasmids such as pBR322, pBR325, pACYC177, or pKN410 are used to supply the replicon.

[0393] Typically, the host cell should secrete minimal amounts of proteolytic enzymes, and additional protease inhibitors may desirably be incorporated in the cell culture.

### c) Protein Production

[0394] Host cells are transformed with the above-described expression vectors and cultured in conventional nutrient media modified as appropriate for inducing promoters, selecting transformants, or amplifying the genes encoding the desired sequences. Transformation means introducing DNA into the prokaryotic host so that the DNA is replicable, either as an extrachromosomal element or by chromosomal integrant. Depending on the host cell used, transformation is done using standard techniques appropriate to such cells. The calcium treatment employing calcium chloride is generally used for bacterial cells that contain substantial cell-wall barriers. Another method for transformation employs polyethylene glycol/DMSO. Yet another technique used is electroporation.

[0395] Host cells are transformed with the above-described expression vectors and cultured in conventional nutrient media modified as appropriate for inducing promoters, selecting transformants, or amplifying the genes encoding the desired sequences. Transformation means introducing DNA into the prokaryotic host so that the DNA is replicable, either as an extrachromosomal element or by chromosomal integrant. Depending on the host cell used, transformation is done using standard techniques appropriate to such cells. The calcium treatment employing calcium chloride is generally used for bacterial cells that contain substantial cell-wall barriers. Another method for transformation employs polyethylene glycol/DMSO. Yet another technique used is electroporation.

[0396] Prokaryotic cells used to produce the immunocytokines of the present application are grown in media known in the art and suitable for culture of the selected host cells. Examples of suitable media include luria broth (LB) plus necessary nutrient supplements. In some embodiments, the media also contains a selection agent, chosen based on the construction of the expression vector, to selectively permit growth of prokaryotic cells containing the expression vector. For example, ampicillin is added to media for growth of cells expressing ampicillin resistant gene.

[0397] Any necessary supplements besides carbon, nitrogen, and inorganic phosphate sources may also be included at appropriate concentrations introduced alone or as a mixture with another supplement or medium such as a complex nitrogen source. Optionally the culture medium may contain one or more reducing agents selected from the group consisting of glutathione, cysteine, cystamine, thioglycollate, dithioerythritol and dithiothreitol. The prokaryotic host cells are cultured at suitable temperatures. For E. coli growth, for example, the preferred temperature ranges from about 20° C. to about 39° C., more preferably from about 25° C. to about 37° C., even more preferably at about 30° C. The pH of the medium may be any pH ranging from about 5 to about 9, depending mainly on the host organism. For E. coli, the pH is preferably from about 6.8 to about 7.4, and more preferably about 7.0.

[0398] If an inducible promoter is used in the expression vector of the present application, protein expression is induced under conditions suitable for the activation of the promoter. In one aspect of the present application, PhoA promoters are used for controlling transcription of the polypeptides. Accordingly, the transformed host cells are cultured in a phosphate-limiting medium for induction. Preferably, the phosphate-limiting medium is the C.R.A.P medium (see, e.g., Simmons et al., J. Immunol. Methods (2002), 263:133-147). A variety of other inducers may be used, according to the vector construct employed, as is known in the art.

[0399] The expressed immunocytokines of the present application are secreted into and recovered from the periplasm of the host cells. Protein recovery typically involves disrupting the microorganism, generally by such means as osmotic shock, sonication or lysis. Once cells are disrupted, cell debris or whole cells may be removed by centrifugation or filtration. The proteins may be further purified, for example, by affinity resin chromatography. Alternatively, proteins can be transported into the culture media and isolated therein. Cells may be removed from the culture and the culture supernatant being filtered and concentrated for further purification of the proteins produced. The expressed polypeptides can be further isolated and identified using commonly known methods such as polyacrylamide gel electrophoresis (PAGE) and Western blot assay.

[0400] Alternatively, protein production is conducted in large quantity by a fermentation process. Various large-scale fed-batch fermentation procedures are available for production of recombinant proteins. Large-scale fermentations have at least 1000 liters of capacity, preferably about 1,000 to 100,000 liters of capacity. These fermentors use agitator impellers to distribute oxygen and nutrients, especially glucose (the preferred carbon/energy source). Small-scale fermentation refers generally to fermentation in a fermentor that is no more than approximately 100 liters in volumetric capacity, and can range from about 1 liter to about 100 liters.

[0401] During the fermentation process, induction of protein expression is typically initiated after the cells have been grown under suitable conditions to a desired density, e.g., an OD₅₅₀ of about 180-220, at which stage the cells are in the early stationary phase. A variety of inducers may be used, according to the vector construct employed, as is known in the art and described above. Cells may be grown for shorter periods prior to induction. Cells are usually induced for about 12-50 hours, although longer or shorter induction time may be used.

[0402] To improve the production yield and quality of the immunocytokines of the present application, various fermentation conditions can be modified. For example, to improve the proper assembly and folding of the secreted polypeptides, additional vectors overexpressing chaperone proteins, such as Dsb proteins (DsbA, DsbB, DsbC, DsbD, or DsbG) or FkpA (a peptidylprolyl cis, trans-isomerase with chaperone activity) can be used to co-transform the host prokaryotic cells.

[0403] The chaperone proteins have been demonstrated to facilitate the proper folding and solubility of heterologous proteins produced in bacterial host cells. Chen et al. (1999) J Bio Chem 274:19601-19605; Georgiou et al., U.S. Pat. No. 6,083,715; Georgiou et al., U.S. Pat. No. 6,027,888; Bothmann and Pluckthun (2000) J. Biol. Chem. 275:17100-17105; Ramm and Pluckthun (2000) J. Biol. Chem. 275:17106-17113; Arie et al. (2001)Mol. Microbiol. 39:199-210.

[0404] To minimize proteolysis of expressed heterologous proteins (especially those that are proteolytically sensitive), certain host strains deficient for proteolytic enzymes can be used for the present invention. For example, host cell strains may be modified to effect genetic mutation(s) in the genes encoding known bacterial proteases such as Protease III, OmpT, DegP, Tsp, Protease I, Protease Mi, Protease V, Protease VI and combinations thereof. Some E. coli protease-deficient strains are available and described in, for example, Joly et al. (1998), supra; Georgiou et al., U.S. Pat. No. 5,264,365; Georgiou et al., U.S. Pat. No. 5,508,192; Hara et al., Microbial Drug Resistance, 2:63-72 (1996).

[0405] E. coli strains deficient for proteolytic enzymes and transformed with plasmids overexpressing one or more chaperone proteins may be used as host cells in the expression system encoding the immunocytokines of the present application.

### d) Protein Purification

[0406] The immunocytokines produced herein are further purified to obtain preparations that are substantially homogeneous for further assays and uses. Standard protein purification methods known in the art can be employed. The following procedures are exemplary of suitable purification procedures: fractionation on immunoaffinity or ion-exchange columns, ethanol precipitation, reverse phase HPLC, chromatography on silica or on a cation-exchange resin such as DEAE, chromatofocusing, SDS-PAGE, ammonium sulfate precipitation, and gel filtration using, for example, Sephadex G-75.

[0407] In some embodiments, Protein A immobilized on a solid phase is used for immunoaffinity purification of the immunocytokines comprising an Fc region of the present application. Protein A is a 42 kDa surface protein from Staphylococcus aureas which binds with a high affinity to Fc-containing constructs, e.g., antigen-binding fragment-hinge-Fc fusion proteins, antibodies, or immunocytokines described herein. Lindmark et al (1983) J. Immunol. Meth. 62:1-13. The solid phase to which Protein A is immobilized is preferably a column comprising a glass or silica surface, more preferably a controlled pore glass column or a silicic acid column. In some applications, the column has been coated with a reagent, such as glycerol, in an attempt to prevent nonspecific adherence of contaminants. The solid phase is then washed to remove contaminants non-specifically bound to the solid phase. Finally, the immunocytokines of interest are recovered from the solid phase by elution.

### 2. Recombinant Production in Eukaryotic Cells

[0408] For eukaryotic expression, the vector components generally include, but are not limited to, one or more of the following, a signal sequence, an origin of replication, one or more marker genes, and enhancer element, a promoter, and a transcription termination sequence.

### a) Signal Sequence Component

[0409] A vector for use in a eukaryotic host may also an insert that encodes a signal sequence or other polypeptide having a specific cleavage site at the N-terminus of the mature protein or polypeptide. The heterologous signal sequence selected preferably is one that is recognized and processed (i.e., cleaved by a signal peptidase) by the host cell. In mammalian cell expression, mammalian signal sequences as well as viral secretory leaders, for example, the herpes simplex gD signal, are available. The DNA for such precursor region is ligated in reading frame to DNA encoding the immunocytokines of the present application.

[0410] b) Origin of Replication

[0411] Generally, the origin of replication component is not needed for mammalian expression vectors (the SV40 origin may typically be used only because it contains the early promoter).

### c) Selection Gene Component

[0412] Expression and cloning vectors may contain a selection gene, also termed a selectable marker. Typical selection genes encode proteins that (a) confer resistance to antibiotics or other toxins, e.g., ampicillin, neomycin, methotrexate, or tetracycline, (b) complement auxotrophic deficiencies, or (c) supply critical nutrients not available from complex media, e.g., the gene encoding D-alanine racemase for Bacilli.

[0413] One example of a selection scheme utilizes a drug to arrest growth of a host cell. Those cells that are successfully transformed with a heterologous gene produce a protein conferring drug resistance and thus survive the selection regimen. Examples of such dominant selection use the drugs neomycin, mycophenolic acid and hygromycin.

[0414] Another example of suitable selectable markers for mammalian cells are those that enable the identification of cells competent to take up nucleic acid encoding the immunocytokines of the present application, such as DHFR, thymidine kinase, met allothionein-I and —II, preferably primate met allothionein genes, adenosine deaminase, ornithine decarboxylase, etc.

[0415] For example, cells transformed with the DHFR selection gene are first identified by culturing all of the transformants in a culture medium that contains methotrexate (Mtx), a competitive antagonist of DHFR. An appropriate host cell when wild-type DHFR is employed is the Chinese hamster ovary (CHO) cell line deficient in DHFR activity (e.g., ATCC CRL-9096).

[0416] Alternatively, host cells (particularly wild-type hosts that contain endogenous DHFR) transformed or co-transformed with the polypeptide encoding-DNA sequences, wild-type DHFR protein, and another selectable marker such as aminoglycoside 3′-phosphotransferase (APH) can be selected by cell growth in medium containing a selection agent for the selectable marker such as an aminoglycosidic antibiotic, e.g., kanamycin, neomycin, or G418. See U.S. Pat. No. 4,965,199.

### d) Promoter Component

[0417] Expression and cloning vectors usually contain a promoter that is recognized by the host organism and is operably linked to the nucleic acid encoding the desired polypeptide sequences.

[0418] Virtually all eukaryotic genes have an AT-rich region located approximately 25 to 30 based upstream from the site where transcription is initiated. Another sequence found 70 to 80 bases upstream from the start of the transcription of many genes is a CNCAAT region where N may be any nucleotide. At the 3′ end of most eukaryotic is an AATAAA sequence that may be the signal for addition of the poly A tail to the 3′ end of the coding sequence. All of these sequences may be inserted into eukaryotic expression vectors. Also see “Promoters” subsection under “III. Vectors encoding immunocytokines” above.

[0419] Polypeptide transcription from vectors in mammalian host cells is controlled, for example, by promoters obtained from the genomes of viruses such as polyoma virus, fowlpox virus, adenovirus (such as Adenovirus 2), bovine papilloma virus, avian sarcoma virus, cytomegalovirus, a retrovirus, hepatitis-B virus and most preferably Simian Virus 40 (SV40), from heterologous mammalian promoters, e.g., the actin promoter or an immunoglobulin promoter, from heat-shock promoters, provided such promoters are compatible with the host cell systems.

[0420] The early and late promoters of the SV40 virus are conveniently obtained as an SV40 restriction fragment that also contains the SV40 viral origin of replication. The immediate early promoter of the human cytomegalovirus is conveniently obtained as a HindIII E restriction fragment. A system for expressing DNA in mammalian hosts using the bovine papilloma virus as a vector is disclosed in U.S. Pat. No. 4,419,446. A modification of this system is described in U.S. Pat. No. 4,601,978. See also Reyes et al., Nature 297:598-601 (1982) on expression of human-interferon cDNA in mouse cells under the control of a thymidine kinase promoter from herpes simplex virus. Alternatively, the Rous Sarcoma Virus long terminal repeat can be used as the promoter.

### e) Enhancer Element Component

[0421] Transcription of a DNA encoding the immunocytokines of the present application by higher eukaryotes is often increased by inserting an enhancer sequence into the vector. Many enhancer sequences are now known from mammalian genes (globin, elastase, albumin, a-fetoprotein, and insulin). Typically, however, one will use an enhancer from a eukaryotic cell virus. Examples include the SV40 enhancer on the late side of the replication origin (100-270 bp), the cytomegalovirus early promoter enhancer, the polyoma enhancer on the late side of the replication origin, and adenovirus enhancers. See also Yaniv, Nature 297:17-18 (1982) on enhancing elements for activation of eukaryotic promoters. The enhancer may be spliced into the vector at a position 5′ or 3′ to the polypeptide encoding sequence, but is preferably located at a site 5′ from the promoter.

### f) Transcription Termination Component

[0422] Expression vectors used in eukaryotic host cells (yeast, fungi, insect, plant, animal, human, or nucleated cells from other multicellular organisms) will also contain sequences necessary for the termination of transcription and for stabilizing the mRNA. Such sequences are commonly available from the 5′ and, occasionally 3′, untranslated regions of eukaryotic or viral DNAs or cDNAs. These regions contain nucleotide segments transcribed as polyadenylated fragments in the untranslated portion of the polypeptide-encoding mRNA. One useful transcription termination component is the bovine growth hormone polyadenylation region. See WO94/11026 and the expression vector disclosed therein.

### g) Selection and Transformation of Host Cells

[0423] Suitable host cells for cloning or expressing the DNA in the vectors herein include higher eukaryote cells described herein, including vertebrate host cells. Propagation of vertebrate cells in culture (tissue culture) has become a routine procedure. Examples of useful mammalian host cell lines are monkey kidney CV1 line transformed by SV40 (COS-7, ATCC CRL 1651); human embryonic kidney line (293 or 293 cells subcloned for growth in suspension culture, Graham et al., J. Gen Virol. 36:59 (1977)); baby hamster kidney cells (BHK, ATCC CCL 10); Chinese hamster ovary cells/-DHFR (CHO, Urlaub et al., Proc. Natl. Acad. Sci. USA 77:4216 (1980)); mouse sertoli cells (TM4, Mather, Biol. Reprod. 23:243-251 (1980)); monkey kidney cells (CV1 ATCC CCL 70); African green monkey kidney cells (VERO-76, ATCC CRL-1587); human cervical carcinoma cells (HELA, ATCC CCL 2); canine kidney cells (MDCK, ATCC CCL 34); buffalo rat liver cells (BRL 3A, ATCC CRL 1442); human lung cells (W138, ATCC CCL 75); human liver cells (Hep G2, HB 8065); mouse mammary tumor (MMT 060562, ATCC CCL51); TR1 cells (Mather et al., Annals N.Y. Acad. Sci. 383:44-68 (1982)); MRC 5 cells; FS4 cells; and a human hepatoma line (Hep G2).

[0424] Host cells are transformed with the above-described expression or cloning vectors for immunocytokine production and cultured in conventional nutrient media modified as appropriate for inducing promoters, selecting transformants, or amplifying the genes encoding the desired sequences.

### h) Culturing the Host Cells

[0425] The host cells used to produce the immunocytokines of the present application may be cultured in a variety of media. Commercially available media such as Ham's F10 (Sigma), Minimal Essential Medium ((MEM), (Sigma), RPMI-1640 (Sigma), and Dulbecco's Modified Eagle's Medium ((DMEM), Sigma) are suitable for culturing the host cells. In addition, any of the media described in Ham et al., Meth. Enz. 58:44 (1979), Barnes et al., Anal. Biochem. 102:255 (1980), U.S. Pat. Nos. 4,767,704; 4,657,866; 4,927,762; 4,560,655; or 5,122,469; WO 90/03430; WO 87/00195; or U.S. Pat. Re. 30,985 may be used as culture media for the host cells. Any of these media may be supplemented as necessary with hormones and/or other growth factors (such as insulin, transferrin, or epidermal growth factor), salts (such as sodium chloride, calcium, magnesium, and phosphate), buffers (such as HEPES), nucleotides (such as adenosine and thymidine), antibiotics (such as GENTAMYCIN™ drug), trace elements (defined as inorganic compounds usually present at final concentrations in the micromolar range), and glucose or an equivalent energy source. Any other necessary supplements may also be included at appropriate concentrations that would be known to those skilled in the art. The culture conditions, such as temperature, pH, and the like, are those previously used with the host cell selected for expression, and will be apparent to the ordinarily skilled artisan.

### i) Protein Purification

[0426] When using recombinant techniques, the immunocytokine can be produced intracellularly, in the periplasmic space, or directly secreted into the medium. If the immunocytokine is produced intracellularly, as a first step, the particulate debris, either host cells or lysed fragments, are removed, for example, by centrifugation or ultrafiltration. Carter et al., Bio Technology 10:163-167 (1992) describe a procedure for isolating antibodies which are secreted to the periplasmic space of E. coli. Briefly, cell paste is thawed in the presence of sodium acetate (pH 3.5), EDTA, and phenylmethylsulfonylfluoride (PMSF) over about 30 min. Cell debris can be removed by centrifugation. Where the immunocytokine is secreted into the medium, supernatants from such expression systems are generally first concentrated using a commercially available protein concentration filter, for example, an Amicon or Millipore Pellicon ultrafiltration unit. A protease inhibitor such as PMSF may be included in any of the foregoing steps to inhibit proteolysis and antibiotics may be included to prevent the growth of adventitious contaminants.

[0427] The protein composition prepared from the cells can be purified using, for example, hydroxylapatite chromatography, gel electrophoresis, dialysis, and affinity chromatography, with affinity chromatography being the preferred purification technique. The suitability of protein A as an affinity ligand depends on the species and isotype of any immunoglobulin Fc domain that is present in the immunocytokine. Protein A can be used to purify the immunocytokines, antigen-binding fragment-Fc fusion proteins, or antibodies that are based on human immunoglobulins containing 1, 2, or 4 heavy chains (Lindmark et al., J. Immunol. Meth. 62:1-13 (1983)). Protein G is recommended for all mouse isotypes and for human 3 (Guss et al., EMBO J. 5:15671575 (1986)). The matrix to which the affinity ligand is attached is most often agarose, but other matrices are available. Mechanically stable matrices such as controlled pore glass or poly(styrene-divinyl) benzene allow for faster flow rates and shorter processing times than can be achieved with agarose.

[0428] Where the immunocytokine comprises a C_{H}3 domain, the Bakerbond ABXTMresin (J. T. Baker, Phillipsburg, N.J.) is useful for purification. Other techniques for protein purification such as fractionation on an ion-exchange column, ethanol precipitation, Reverse Phase HPLC, chromatography on silica, chromatography on heparin SEPHAROSE™ chromatography on an anion or cation exchange resin (such as a polyaspartic acid column), chromatofocusing, SDS-PAGE, and ammonium sulfate precipitation are also available depending on the immunocytokine to be recovered.

[0429] Following any preliminary purification step(s), the mixture comprising the immunocytokine of interest and contaminants may be subjected to low pH hydrophobic interaction chromatography using an elution buffer at a pH between about 2.5-4.5, preferably performed at low salt concentrations (e.g., from about 0-0.25M salt).

### V. Pharmaceutical Compositions

[0430] Further provided are pharmaceutical compositions comprising any of the immunocytokines described herein (e.g., IL-2/anti-HER2 immunocytokine, IL-2/anti-CD3 immunocytokine, IL-2/anti-PD-1 immunocytokine, IL-2/anti-CD4 immunocytokine, IL-2/anti-CD8 immunocytokine, IL-2/anti-CTLA-4 immunocytokine, IL-2/anti-PD-L1 immunocytokine, IL-2/anti-CD25 immunocytokine, IL-2/PD-L2-Fc immunocytokine, IL-12/anti-HER2 immunocytokine, IL-12/anti-CD3 immunocytokine, IL-12/anti-PD-1 immunocytokine, IL-12/anti-CD4 immunocytokine, IL-12/anti-CD8 immunocytokine, IL-12/anti-CTLA-4 immunocytokine, IL-12/anti-PD-L1 immunocytokine, IL-12/anti-CD25 immunocytokine, IL-12/PD-L2-Fc immunocytokine, IL-23/anti-HER2 immunocytokine, IL-23/anti-CD3 immunocytokine, IL-23/anti-PD-1 immunocytokine, IL-23/anti-CD4 immunocytokine, IL-23/anti-CD8 immunocytokine, IL-23/anti-CTLA-4 immunocytokine, IL-23/anti-PD-L1 immunocytokine, IL-23/anti-CD25 immunocytokine, IL-23/PD-L2-Fc immunocytokine, IL-10/anti-HER2 immunocytokine, IL-10/anti-CD3 immunocytokine, IL-10/anti-PD-1 immunocytokine, IL-10/anti-CD4 immunocytokine, IL-10/anti-CD8 immunocytokine, IL-10/anti-CTLA-4 immunocytokine, IL-10/anti-PD-L1 immunocytokine, IL-10/anti-CD25 immunocytokine, IL-10/PD-L2-Fc immunocytokine, IFN-γ/anti-HER2 immunocytokine, IFN-γ/anti-CD3 immunocytokine, IFN-γ/anti-PD-1 immunocytokine, IFN-γ/anti-CD4 immunocytokine, IFN-γ/anti-CD8 immunocytokine, IFN-γ/anti-CTLA-4 immunocytokine, IFN-γ/anti-PD-L1 immunocytokine, IFN-γ/anti-CD25 immunocytokine, IFN-γ/PD-L2-Fc immunocytokine, IFN-α/anti-HER2 immunocytokine, IFN-α/anti-CD3 immunocytokine, IFN-α/anti-PD-1 immunocytokine, IFN-α/anti-CD4 immunocytokine, IFN-α/anti-CD8 immunocytokine, IFN-α/anti-CTLA-4 immunocytokine, IFN-α/anti-PD-L1 immunocytokine, IFN-α/anti-CD25 immunocytokine, or IFN-α/PD-L2-Fc immunocytokine), and optionally a pharmaceutically acceptable carrier. Pharmaceutical compositions can be prepared by mixing an immunocytokine described herein having the desired degree of purity with optional pharmaceutically acceptable carriers, excipients or stabilizers (Remington's Pharmaceutical Sciences 16th edition, Osol, A. Ed. (1980)), in the form of lyophilized formulations or aqueous solutions. Also provided are cancer vaccines comprising any of the immunocytokines described herein, or pharmaceutical compositions thereof.

[0431] A reconstituted formulation can be prepared by dissolving a lyophilized immunocytokine described herein in a diluent such that the protein is dispersed throughout. Exemplary pharmaceutically acceptable (safe and non-toxic for administration to a human) diluents suitable for use in the present application include, but are not limited to, sterile water, bacteriostatic water for injection (BWFI), a pH buffered solution (e.g., phosphate-buffered saline), sterile saline solution, Ringer's solution or dextrose solution, or aqueous solutions of salts and/or buffers.

[0432] In some embodiments, the pharmaceutical composition comprises a homogeneous population of immunocytokines described herein. A homogeneous population means the immunocytokines are exactly the same to each other, e.g., same immunocytokine configuration, same cytokine moiety, same antigen-binding fragments (e.g., ligand, receptor, VHH, scFv, or Fab), same linker if any, same hinge region, and same Fc domain. In some embodiments, at least about 70% (such as at least about any of 75%, 80%, 85%, 90%, 95%, 96%, 97%, 98%, or 99%) of the immunocytokines in the pharmaceutical composition are homogeneous.

[0433] The pharmaceutical composition is preferably to be stable, in which the immunocytokine here essentially retains its physical and chemical stability and integrity upon storage. Various analytical techniques for measuring protein stability are available in the art and are reviewed in Peptide and Protein Drug Delivery, 247-301, Vincent Lee Ed., Marcel Dekker, Inc., New York, N.Y., Pubs. (1991) and Jones, A. Adv. Drug Delivery Rev. 10: 29-90 (1993). Stability can be measured at a selected temperature for a selected time period. For rapid screening, the formulation may be kept at 40° C. for 2 weeks to 1 month, at which time stability is measured. Where the formulation is to be stored at 2-8° C., generally the formulation should be stable at 30° C. or 40° C. for at least 1 month, and/or stable at 2-8° C. for at least 2 years. Where the formulation is to be stored at 30° C., generally the formulation should be stable for at least 2 years at 30° C., and/or stable at 40° C. for at least 6 months. For example, the extent of aggregation during storage can be used as an indicator of protein stability. In some embodiments, the stable formulation of immunocytokines described herein may comprise less than about 10% (preferably less than about 5%) of the immunocytokines present as an aggregate in the formulation.

[0434] Acceptable carriers, excipients, or stabilizers are nontoxic to recipients at the dosages and concentrations employed, and include buffers, antioxidants including ascorbic acid, methionine, Vitamin E, sodium metabisulfite; preservatives, isotonicifiers (e.g., sodium chloride), stabilizers, metal complexes (e.g., Zn-protein complexes); chelating agents such as EDTA and/or non-ionic surfactants.

[0435] Examples of physiologically acceptable carriers include buffers such as phosphate, citrate, and other organic acids; antioxidants including ascorbic acid and methionine; preservatives (such as octadecyldimethylbenzyl ammonium chloride; hexamethonium chloride; benzalkonium chloride, benzethonium chloride; phenol, butyl or benzyl alcohol; alkyl parabens such as methyl or propyl paraben; catechol; resorcinol; cyclohexanol; 3-pentanol; and m-cresol); low molecular weight (less than about 10 residues) polypeptide; proteins, such as serum albumin, gelatin, or immunoglobulins; hydrophilic polymers such as polyvinylpyrrolidone; amino acids such as glycine, glutamine, asparagine, arginine or lysine; monosaccharides, disaccharides, and other carbohydrates including glucose, mannose, or dextrins; chelating agents such as EDTA; sugars such as sucrose, mannitol, trehalose or sorbitol; salt-forming counterions such as sodium; metal complexes (e.g. Zn-protein complexes); and/or nonionic surfactants such as TWEEN™ polyethylene glycol (PEG), and PLURONICS™ or polyethylene glycol (PEG).

[0436] Buffers are used to control the pH in a range which optimizes the therapeutic effectiveness, especially if stability is pH dependent. Buffers are preferably present at concentrations ranging from about 50 mM to about 250 mM. Suitable buffering agents for use in the present application include both organic and inorganic acids and salts thereof. For example, citrate, phosphate, succinate, tartrate, fumarate, gluconate, oxalate, lactate, acetate. Additionally, buffers may comprise histidine and trimethylamine salts such as Tris.

[0437] Preservatives are added to retard microbial growth, and are typically present in a range from 0.2%-1.0% (w/v). The addition of a preservative may, for example, facilitate the production of a multi-use (multiple dose) formulation. Suitable preservatives for use in the present application include octadecyldimethylbenzyl ammonium chloride; hexamethonium chloride; benzalkonium halides (e.g., chloride, bromide, iodide), benzethonium chloride; thimerosal, phenol, butyl or benzyl alcohol; alkyl parabens such as methyl or propyl paraben; catechol; resorcinol; cyclohexanol, 3-pentanol, and m-cresol.

[0438] Tonicity agents, sometimes known as “stabilizers” are present to adjust or maintain the tonicity of liquid in a composition. When used with large, charged biomolecules such as proteins and antibodies, they are often termed “stabilizers” because they can interact with the charged groups of the amino acid side chains, thereby lessening the potential for inter and intra-molecular interactions. Tonicity agents can be present in any amount between 0.1% to 25% by weight, preferably 1% to 5%, taking into account the relative amounts of the other ingredients. Preferred tonicity agents include polyhydric sugar alcohols, preferably trihydric or higher sugar alcohols, such as glycerin, erythritol, arabitol, xylitol, sorbitol and mannitol.

[0439] Additional excipients include agents which can serve as one or more of the following: (1) bulking agents, (2) solubility enhancers, (3) stabilizers and (4) and agents preventing denaturation or adherence to the container wall. Such excipients include: polyhydric sugar alcohols (enumerated above); amino acids such as alanine, glycine, glutamine, asparagine, histidine, arginine, lysine, ornithine, leucine, 2-phenylalanine, glutamic acid, threonine, etc.; organic sugars or sugar alcohols such as sucrose, lactose, lactitol, trehalose, stachyose, mannose, sorbose, xylose, ribose, ribitol, myoinisitose, myoinisitol, galactose, galactitol, glycerol, cyclitols (e.g., inositol), polyethylene glycol; sulfur containing reducing agents, such as urea, glutathione, thioctic acid, sodium thioglycolate, thioglycerol, a-monothioglycerol and sodium thio sulfate; low molecular weight proteins such as human serum albumin, bovine serum albumin, gelatin or other immunoglobulins; hydrophilic polymers such as polyvinylpyrrolidone; monosaccharides (e.g., xylose, mannose, fructose, glucose; disaccharides (e.g., lactose, maltose, sucrose); trisaccharides such as raffinose; and polysaccharides such as dextrin or dextran.

[0440] Non-ionic surfactants or detergents (also known as “wetting agents”) are present to help solubilize the immunocytokines as well as to protect the immunocytokines against agitation-induced aggregation, which also permits the formulation to be exposed to shear surface stress without causing denaturation of the active immunocytokines. Non-ionic surfactants are present in a range of about 0.05 mg/ml to about 1.0 mg/ml, preferably about 0.07 mg/ml to about 0.2 mg/ml.

[0441] Suitable non-ionic surfactants include polysorbates (20, 40, 60, 65, 80, etc.), polyoxamers (184, 188, etc.), PLURONIC® polyols, TRITON®, polyoxyethylene sorbitan monoethers (TWEEN®-20, TWEEN®-80, etc.), lauromacrogol 400, polyoxyl 40 stearate, polyoxyethylene hydrogenated castor oil 10, 50 and 60, glycerol monostearate, sucrose fatty acid ester, methyl cellulose and carboxymethyl cellulose. Anionic detergents that can be used include sodium lauryl sulfate, dioctyle sodium sulfosuccinate and dioctyl sodium sulfonate. Cationic detergents include benzalkonium chloride or benzethonium chloride.

[0442] In order for the pharmaceutical compositions to be used for in vivo administration, they must be sterile. The pharmaceutical composition may be rendered sterile by filtration through sterile filtration membranes. The pharmaceutical compositions herein generally are placed into a container having a sterile access port, for example, an intravenous solution bag or vial having a stopper pierceable by a hypodermic injection needle.

[0443] Sustained-release preparations may be prepared. Suitable examples of sustained-release preparations include semi-permeable matrices of solid hydrophobic polymers containing the antagonist, which matrices are in the form of shaped articles, e.g., films, or microcapsules. Examples of sustained-release matrices include polyesters, hydrogels (for example, poly(2-hydroxyethyl-methacrylate), or poly(vinylalcohol)), polylactides (U.S. Pat. No. 3,773,919), copolymers of L-glutamic acid and ethyl-L-glutamate, non-degradable ethylene-vinyl acetate, degradable lactic acid-glycolic acid copolymers such as the LUPRON DEPOT™ (injectable microspheres composed of lactic acid-glycolic acid copolymer and leuprolide acetate), and poly-D-(−)-3-hydroxybutyric acid.

[0444] The pharmaceutical compositions herein may also contain more than one active compound as necessary for the particular indication being treated, preferably those with complementary activities that do not adversely affect each other. Alternatively, or in addition, the composition may comprise a cytotoxic agent, chemotherapeutic agent, cytokine, immunosuppressive agent, or growth inhibitory agent. Such molecules are suitably present in combination in amounts that are effective for the purpose intended.

[0445] The active ingredients may also be entrapped in microcapsules prepared, for example, by coacervation techniques or by interfacial polymerization, for example, hydroxymethylcellulose or gelatin-microcapsules and poly-(methylmethacylate) microcapsules, respectively, in colloidal drug delivery systems (for example, liposomes, albumin microspheres, microemulsions, nanoparticles and nanocapsules) or in macroemulsions. Such techniques are disclosed in Remington's Pharmaceutical Sciences 18th edition.

[0446] In some embodiments, the pharmaceutical composition is contained in a single-use vial, such as a single-use sealed vial. In some embodiments, the pharmaceutical composition is contained in a multi-use vial. In some embodiments, the pharmaceutical composition is contained in bulk in a container. In some embodiments, the pharmaceutical composition is cryopreserved.

### VI. Methods of Treating Diseases or Directing Cytokine Activity

[0447] The immunocytokines described herein (e.g., IL-2/anti-HER2 immunocytokine, IL-2/anti-CD3 immunocytokine, IL-2/anti-PD-1 immunocytokine, IL-2/anti-CD4 immunocytokine, IL-2/anti-CD8 immunocytokine, IL-2/anti-CTLA-4 immunocytokine, IL-2/anti-PD-L1 immunocytokine, IL-2/anti-CD25 immunocytokine, IL-2/PD-L2-Fc immunocytokine, IL-12/anti-HER2 immunocytokine, IL-12/anti-CD3 immunocytokine, IL-12/anti-PD-1 immunocytokine, IL-12/anti-CD4 immunocytokine, IL-12/anti-CD8 immunocytokine, IL-12/anti-CTLA-4 immunocytokine, IL-12/anti-PD-L1 immunocytokine, IL-12/anti-CD25 immunocytokine, IL-12/PD-L2-Fc immunocytokine, IL-23/anti-HER2 immunocytokine, IL-23/anti-CD3 immunocytokine, IL-23/anti-PD-1 immunocytokine, IL-23/anti-CD4 immunocytokine, IL-23/anti-CD8 immunocytokine, IL-23/anti-CTLA-4 immunocytokine, IL-23/anti-PD-L1 immunocytokine, IL-23/anti-CD25 immunocytokine, IL-23/PD-L2-Fc immunocytokine, IL-10/anti-HER2 immunocytokine, IL-10/anti-CD3 immunocytokine, IL-10/anti-PD-1 immunocytokine, IL-10/anti-CD4 immunocytokine, IL-10/anti-CD8 immunocytokine, IL-10/anti-CTLA-4 immunocytokine, IL-10/anti-PD-L1 immunocytokine, IL-10/anti-CD25 immunocytokine, IL-10/PD-L2-Fc immunocytokine, IFN-γ/anti-HER2 immunocytokine, IFN-γ/anti-CD3 immunocytokine, IFN-γ/anti-PD-1 immunocytokine, IFN-γ/anti-CD4 immunocytokine, IFN-γ/anti-CD8 immunocytokine, IFN-γ/anti-CTLA-4 immunocytokine, IFN-γ/anti-PD-L1 immunocytokine, IFN-γ/anti-CD25 immunocytokine, IFN-γ/PD-L2-Fc immunocytokine, IFN-α/anti-HER2 immunocytokine, IFN-α/anti-CD3 immunocytokine, IFN-α/anti-PD-1 immunocytokine, IFN-α/anti-CD4 immunocytokine, IFN-α/anti-CD8 immunocytokine, IFN-α/anti-CTLA-4 immunocytokine, IFN-α/anti-PD-L1 immunocytokine, IFN-α/anti-CD25 immunocytokine, or IFN-α/PD-L2-Fc immunocytokine) and compositions (e.g., pharmaceutical compositions) thereof are useful for a variety of applications, such as in diagnosis, molecular assays, and therapy. In some embodiments, there is provided a method of treating a disease (e.g., cancer, infection such as viral infection, autoimmune disease, allergy, graft rejection, or GvHD) in an individual (e.g., human), comprising administering to the individual an effective amount of any of the immunocytokines described herein or pharmaceutical compositions thereof. In some embodiments, there is also provided a method of selectively activating the activity of a cytokine or variant thereof (e.g., IL-2, IFN-α (e.g., IFN-α2b), IFN-γ, IL-10, IL-12, or IL-23) to a cell expressing a target antigen (e.g., CTLA-4, PD-L1, PD-L2, CD25, HER2, PD-1, CD123, CD3, CD4, or CD8) in an individual (e.g., human), comprising administering to the individual an effective amount of any of the immunocytokines described herein or pharmaceutical compositions thereof, wherein the activity of the cytokine or variant thereof is selectively activated upon binding of the immunocytokine to the target antigen. In some embodiments, the individual has been previously treated with any of the immunocytokines described herein, or pharmaceutical composition thereof against a cancer, and the treatment comprises preventing the cancer recurrence in the individual. In some embodiments, the treatment comprises preventing a cancer in the individual, regardless if the individual has the cancer before or not, or has been treated by the immunocytokines described herein or not. In some embodiments, there is also provided a method of preventing a cancer in an individual, comprising administering to the individual an effective amount of any of the immunocytokines described herein, pharmaceutical composition or cancer vaccine thereof.

[0448] Thus in some embodiments, there is provided a method of treating a disease (e.g., cancer, infection such as viral infection, autoimmune disease, allergy, GvHD, or graft rejection) in an individual (e.g., human), comprising administering to the individual an effective amount of an immunocytokine comprising: a) an antigen-binding protein (e.g., antibody such as full-length antibody, or antigen-binding fragment-hinge-Fc fusion protein such as ligand/receptor-hinge-Fc fusion protein) specifically recognizing a target antigen (e.g., CTLA-4, PD-L1, PD-L2, CD25, HER2, PD-1, CD123, CD3, CD4, or CD8); and b) a cytokine (e.g., IL-2, IFN-α (e.g., IFN-α2b), IFN-γ, IL-10, IL-12, or IL-23) or variant thereof, wherein the antigen-binding protein comprises an antigen-binding polypeptide (e.g., antibody heavy chain, or antigen-binding fragment-hinge-Fc fusion polypeptide such as ligand/receptor-hinge-Fc fusion polypeptide) comprising from N′ to C′: an antigen-binding fragment (e.g., ligand, receptor, VHH, scFv, or VH), a hinge region, and an Fc domain subunit or portion thereof (e.g., CH2+CH3, or CH2 only), and wherein the cytokine or variant thereof is positioned at (e.g., at the N′ of, at the C′ of, or within) the hinge region; and optionally a pharmaceutical acceptable carrier. In some embodiments, there is provided a method of treating a disease (e.g., cancer, infection such as viral infection, autoimmune disease, allergy, GvHD, or graft rejection) in an individual (e.g., human), comprising administering to the individual an effective amount of an immunocytokine comprising: a) an antibody (e.g., full-length antibody, heavy chain only antibody, or antigen-binding fragment fused to an Fc domain subunit or portion thereof via a hinge region) specifically recognizing a target antigen (e.g., CTLA-4, PD-L1, PD-L2, CD25, HER2, PD-1, CD123, CD3, CD4, or CD8); and b) a cytokine (e.g., IL-2, IFN-α (e.g., IFN-α2b), IFN-γ, IL-10, IL-12, or IL-23) or variant thereof, wherein the antibody comprises a heavy chain comprising a hinge region, and wherein the cytokine or variant thereof is positioned at the hinge region (e.g., within the hinge region, or between the C-terminus of CH1 and the N-terminus of the hinge region) of the heavy chain; and optionally a pharmaceutical acceptable carrier. In some embodiments, there is provided a method of treating a disease (e.g., cancer, infection such as viral infection, autoimmune disease, allergy, GvHD, or graft rejection) in an individual (e.g., human), comprising administering to the individual an effective amount of an immunocytokine comprising: a) an antibody specifically recognizing a target antigen (e.g., CTLA-4, PD-L1, PD-L2, CD25, HER2, PD-1, CD123, CD3, CD4, or CD8); and b) a cytokine (e.g., IL-2, IFN-α (e.g., IFN-α2b), IFN-γ, IL-10, IL-12, or IL-23) or variant thereof, wherein the antibody comprises a heavy chain comprising from N-terminus to C-terminus: a V_{H} domain, optionally a C_{H}1 domain, the cytokine or variant thereof at a hinge region, a C_{H}2 domain, and optionally a C_{H}3 domain; and optionally a pharmaceutical acceptable carrier. In some embodiments, there is provided a method of treating a disease (e.g., cancer, infection such as viral infection, autoimmune disease, allergy, GvHD, or graft rejection) in an individual (e.g., human), comprising administering to the individual an effective amount of an immunocytokine comprising: a) a full-length antibody specifically recognizing a target antigen (e.g., CTLA-4, PD-L1, PD-L2, CD25, HER2, PD-1, CD123, CD3, CD4, or CD8); and b) a cytokine (e.g., IL-2, IFN-α (e.g., IFN-α2b), IFN-γ, IL-10, IL-12, or IL-23) or variant thereof, wherein the cytokine or variant thereof is positioned at the hinge region (e.g., within the hinge region, or between the C-terminus of CH1 and the N-terminus of the hinge region) of a heavy chain of the full-length antibody; and optionally a pharmaceutical acceptable carrier. In some embodiments, the immunocytokine or pharmaceutical composition thereof is administered intravenously, subcutaneously, or intratumorally. In some embodiments, the immunocytokine or pharmaceutical composition thereof is administered in an amount of about 1 μg/kg to about 10 mg/kg. In some embodiments, the immunocytokine or pharmaceutical composition thereof is administered once every three weeks.

[0449] In some embodiments, there is provided a method of treating a cancer in an individual (e.g., human), such as by selectively directing cytokine activity to an immune cell (e.g., T cell, B cell, monocyte, NK cell, myeloid DC cell, plasma DC cell, macrophage) in the individual, or by selectively directing cytokine activity to a cancer cell in the individual, comprising administering to the individual an effective amount of any of the IL-2/anti-HER2 immunocytokines, IL-10/anti-HER2 immunocytokines, IL-12/anti-HER2 immunocytokines, IL-23/anti-HER2 immunocytokines, IFN-γ/anti-HER2 immunocytokines, IFN-α/anti-HER2 immunocytokines, IL-2/anti-PD-1 immunocytokines, IL-10/anti-PD-1 immunocytokines, IL-12/anti-PD-1 immunocytokines, IL-23/anti-PD-1 immunocytokines, IFN-γ/anti-PD-1 immunocytokines, IFN-α/anti-PD-1 immunocytokines, IL-2/anti-PD-L1 immunocytokines, IL-10/anti-PD-L1 immunocytokines, IL-12/anti-PD-L1 immunocytokines, IL-23/anti-PD-L1 immunocytokines, IFN-γ/anti-PD-L1 immunocytokines, IFN-α/anti-PD-L1 immunocytokines, IL-2/anti-CTLA-4 immunocytokines, IL-10/anti-CTLA-4 immunocytokines, IL-12/anti-CTLA-4 immunocytokines, IL-23/anti-CTLA-4 immunocytokines, IFN-γ/anti-CTLA-4 immunocytokines, IFN-α/anti-CTLA-4 immunocytokines, IL-2/anti-CD3 immunocytokines, IL-10/anti-CD3 immunocytokines, IL-12/anti-CD3 immunocytokines, IL-23/anti-CD3 immunocytokines, IFN-γ/anti-CD3 immunocytokines, IFN-α/anti-CD3 immunocytokines, IL-2/anti-CD4 immunocytokines, IL-10/anti-CD4 immunocytokines, IL-12/anti-CD4 immunocytokines, IL-23/anti-CD4 immunocytokines, IFN-γ/anti-CD4 immunocytokines, IFN-α/anti-CD4 immunocytokines, IL-2/anti-CD8 immunocytokines, IL-10/anti-CD8 immunocytokines, IL-12/anti-CD8 immunocytokines, IL-23/anti-CD8 immunocytokines, IFN-γ/anti-CD8 immunocytokines, IFN-α/anti-CD8 immunocytokines, IL-2/anti-CD25 immunocytokines, IL-10/anti-CD25 immunocytokines, IL-12/anti-CD25 immunocytokines, IL-23/anti-CD25 immunocytokines, IFN-γ/anti-CD25 immunocytokines, IFN-α/anti-CD25 immunocytokines, IL-2/PD-L2-Fc immunocytokines, IL-10/PD-L2-Fc immunocytokines, IL-12/PD-L2-Fc immunocytokines, IL-23/PD-L2-Fc immunocytokines, IFN-γ/PD-L2-Fc immunocytokines, IFN-α/PD-L2-Fc immunocytokines described herein, or pharmaceutical composition thereof. In some embodiments, there is provided a method of treating a cancer in an individual (e.g., human), such as by selectively directing cytokine activity to an immune cell (e.g., T cell, B cell, monocyte, NK cell, myeloid DC cell, plasma DC cell, macrophage) in the individual, or by selectively directing cytokine activity to a cancer cell in the individual, comprising administering to the individual an effective amount of an immunocytokine (or pharmaceutical composition thereof) comprising: a) an antigen-binding protein (e.g., antibody such as full-length antibody, or antigen-binding fragment-hinge-Fc fusion protein such as ligand/receptor-hinge-Fc fusion protein) specifically recognizing a target antigen (e.g., CTLA-4, PD-L1, PD-L2, CD25, HER2, PD-1, CD123, CD3, CD4, or CD8); and b) a cytokine (e.g., IL-2, IFN-α (e.g., IFN-α2b), IFN-γ, IL-10, IL-12, or IL-23) or variant thereof, wherein the antigen-binding protein comprises an antigen-binding polypeptide (e.g., antibody heavy chain, or antigen-binding fragment-hinge-Fc fusion polypeptide such as ligand/receptor-hinge-Fc fusion polypeptide) comprising from N′ to C′: an antigen-binding fragment (e.g., ligand, receptor, VHH, scFv, or VH), a hinge region, and an Fc domain subunit or portion thereof (e.g., CH2+CH3, or CH2 only), and wherein the cytokine or variant thereof is positioned at (e.g., at the N′ of, at the C′ of, or within) the hinge region. In some embodiments, there is provided a method of treating a cancer in an individual (e.g., human), such as by selectively directing cytokine activity to an immune cell (e.g., T cell, B cell, monocyte, NK cell, myeloid DC cell, plasma DC cell, macrophage) in the individual, or by selectively directing cytokine activity to a cancer cell in the individual, comprising administering to the individual an effective amount of an immunocytokine (or pharmaceutical composition thereof) comprising: a) an antibody (e.g., full-length antibody, heavy chain only antibody, or antigen-binding fragment fused to an Fc domain subunit or portion thereof via a hinge region) specifically recognizing a target antigen (e.g., CTLA-4, PD-L1, PD-L2, CD25, HER2, PD-1, CD123, CD3, CD4, or CD8); and b) a cytokine (e.g., IL-2, IFN-α (e.g., IFN-α2b), IFN-γ, IL-10, IL-12, or IL-23) or variant thereof, wherein the antibody comprises a heavy chain comprising a hinge region, and wherein the cytokine or variant thereof is positioned at the hinge region (e.g., within the hinge region, or between the C-terminus of CH1 and the N-terminus of the hinge region) of the heavy chain. In some embodiments, there is provided a method of treating a cancer in an individual (e.g., human), such as by selectively directing cytokine activity to an immune cell (e.g., T cell, B cell, monocyte, NK cell, myeloid DC cell, plasma DC cell, macrophage) in the individual, or by selectively directing cytokine activity to a cancer cell in the individual, comprising administering to the individual an effective amount of an immunocytokine (or pharmaceutical composition thereof) comprising: a) a full-length antibody specifically recognizing a target antigen (e.g., CTLA-4, PD-L1, PD-L2, CD25, HER2, PD-1, CD123, CD3, CD4, or CD8); and b) a cytokine (e.g., IL-2, IFN-α (e.g., IFN-α2b), IFN-γ, IL-10, IL-12, or IL-23) or variant thereof, wherein the cytokine or variant thereof is positioned at the hinge region (e.g., within the hinge region, or between the C-terminus of CH1 and the N-terminus of the hinge region) of a heavy chain of the full-length antibody. In some embodiments, the immunocytokine or pharmaceutical composition thereof is administered intravenously, subcutaneously, or intratumorally. In some embodiments, the immunocytokine or pharmaceutical composition thereof is administered in an amount of about 1 μg/kg to about 10 mg/kg. In some embodiments, the immunocytokine or pharmaceutical composition thereof is administered once every three weeks. In some embodiments, the cancer is selected from the group consisting of lung cancer, liver cancer, renal cancer, colorectal cancer, ovarian cancer, breast cancer, pancreatic cancer, gastric carcinoma, bile duct cancer, squamous cell carcinoma, bladder cancer, esophageal cancer, mesothelioma, melanoma, head and neck cancer, thyroid cancer, sarcoma, prostate cancer, glioblastoma, cervical cancer, thymic carcinoma, leukemia, lymphoma, myeloma, mycoses fungoides, and merkel cell cancer.

[0450] In some embodiments, there is provided a method of treating a cancer in an individual (e.g., human), or a method of selectively directing cytokine activity to a cancer cell in an individual (e.g., human), comprising administering to the individual an effective amount of an immunocytokine (or pharmaceutical composition thereof) comprising: a) an antigen-binding protein (e.g., antibody such as full-length antibody, or antigen-binding fragment-hinge-Fc fusion protein such as ligand/receptor-hinge-Fc fusion protein) specifically recognizing a target antigen on the cancer cell (e.g., any tumor antigen such as HER2, any cancer cell surface ligand or receptor, or any immune checkpoint molecule expressed on cancer cells such as PD-L1 or PD-L2) of the cancer cell; and b) a cytokine (e.g., any cytokine described herein, such as IL-2, IFN-α (e.g., IFN-α2b), IFN-γ, IL-10, IL-12, or IL-23) or variant thereof, wherein the antigen-binding protein comprises an antigen-binding polypeptide (e.g., antibody heavy chain, or antigen-binding fragment-hinge-Fc fusion polypeptide such as ligand/receptor-hinge-Fc fusion polypeptide) comprising from N′ to C′: an antigen-binding fragment (e.g., ligand, receptor, VHH, scFv, or VH), a hinge region, and an Fc domain subunit or portion thereof (e.g., CH2+CH3, or CH2 only), and wherein the cytokine or variant thereof is positioned at (e.g., at the N′ of, at the C′ of, or within) the hinge region. In some embodiments, there is provided a method of treating a cancer in an individual (e.g., human), or a method of selectively directing cytokine activity to a cancer cell in an individual (e.g., human), comprising administering to the individual an effective amount of an immunocytokine (or pharmaceutical composition thereof) comprising: a) an antibody (e.g., full-length antibody, heavy chain only antibody, or antigen-binding fragment fused to an Fc domain subunit or portion thereof via a hinge region) specifically recognizing a target antigen on the cancer cell (e.g., any tumor antigen such as HER2, any cancer cell surface ligand or receptor, or any immune checkpoint molecule expressed on cancer cells such as PD-L1 or PD-L2) of the cancer cell; and b) a cytokine (e.g., any cytokine described herein, such as IL-2, IFN-α (e.g., IFN-α2b), IFN-γ, IL-10, IL-12, or IL-23) or variant thereof, wherein the antibody comprises a heavy chain comprising a hinge region, and wherein the cytokine or variant thereof is positioned at the hinge region (e.g., within the hinge region, or between the C-terminus of CH1 and the N-terminus of the hinge region) of the heavy chain. In some embodiments, there is provided a method of treating a cancer in an individual (e.g., human), or a method of selectively directing cytokine activity to a cancer cell in an individual (e.g., human), comprising administering to the individual an effective amount of an immunocytokine (or pharmaceutical composition thereof) selected from the group consisting of: IL-2/anti-HER2 immunocytokine, IL-10/anti-HER2 immunocytokine, IL-12/anti-HER2 immunocytokine, IL-23/anti-HER2 immunocytokine, IFN-γ/anti-HER2 immunocytokine, IFN-α/anti-HER2 immunocytokine, IL-2/anti-PD-L1 immunocytokine, IL-10/anti-PD-L1 immunocytokine, IL-12/anti-PD-L1 immunocytokine, IL-23/anti-PD-L1 immunocytokine, IFN-γ/anti-PD-L1 immunocytokine, and IFN-α/anti-PD-L1 immunocytokine. In some embodiments, the immunocytokine or pharmaceutical composition thereof is administered intravenously, subcutaneously, or intratumorally. In some embodiments, the immunocytokine or pharmaceutical composition thereof is administered in an amount of about 1 μg/kg to about 10 mg/kg. In some embodiments, the immunocytokine or pharmaceutical composition thereof is administered once every three weeks. In some embodiments, the cancer is selected from the group consisting of lung cancer, liver cancer, renal cancer, colorectal cancer, ovarian cancer, breast cancer, pancreatic cancer, gastric carcinoma, bile duct cancer, squamous cell carcinoma, bladder cancer, esophageal cancer, mesothelioma, melanoma, head and neck cancer, thyroid cancer, sarcoma, prostate cancer, glioblastoma, cervical cancer, thymic carcinoma, leukemia, lymphoma, myeloma, mycoses fungoides, and merkel cell cancer. In some embodiments, the cancer is HER2+ cancer, such as HER2+ breast cancer. In some embodiments, the cancer is PD-L1+ and/or PD-L2+ cancer.

[0451] In some embodiments, there is provided a method of treating a cancer in an individual (e.g., human), or a method of selectively directing cytokine activity to an immune cell (e.g., T cell, B cell, monocyte, NK cell, myeloid DC cell, plasma DC cell, macrophage) in an individual (e.g., human), comprising administering to the individual an effective amount of an immunocytokine (or pharmaceutical composition thereof) comprising: a) an antigen-binding protein (e.g., antibody such as full-length antibody, or antigen-binding fragment-hinge-Fc fusion protein such as ligand/receptor-hinge-Fc fusion protein) specifically recognizing a target antigen on an immune cell (e.g., any immune cell surface antigen such as CD3, CD4, CD8, CD123, or CD25, or any immune checkpoint molecule expressed on immune cells such as PD-1 or CTLA-4); and b) a cytokine (e.g., any cytokine described herein, such as IL-2, IFN-α (e.g., IFN-α2b), IFN-γ, IL-10, IL-12, or IL-23) or variant thereof, wherein the antigen-binding protein comprises an antigen-binding polypeptide (e.g., antibody heavy chain, or antigen-binding fragment-hinge-Fc fusion polypeptide such as ligand/receptor-hinge-Fc fusion polypeptide) comprising from N′ to C′: an antigen-binding fragment (e.g., ligand, receptor, VHH, scFv, or VH), a hinge region, and an Fc domain subunit or portion thereof (e.g., CH2+CH3, or CH2 only), and wherein the cytokine or variant thereof is positioned at (e.g., at the N′ of, at the C′ of, or within) the hinge region. In some embodiments, there is provided a method of treating a cancer in an individual (e.g., human), or a method of selectively directing cytokine activity to an immune cell (e.g., T cell, B cell, monocyte, NK cell, myeloid DC cell, plasma DC cell, macrophage) in an individual (e.g., human), comprising administering to the individual an effective amount of an immunocytokine (or pharmaceutical composition thereof) comprising: a) an antibody (e.g., full-length antibody, heavy chain only antibody, or antigen-binding fragment fused to an Fc domain subunit or portion thereof via a hinge region) specifically recognizing a target antigen on an immune cell (e.g., any immune cell surface antigen such as CD3, CD4, CD8, CD123, or CD25, or any immune checkpoint molecule expressed on immune cells such as PD-1 or CTLA-4); and b) a cytokine (e.g., any cytokine described herein, such as IL-2, IFN-α (e.g., IFN-α2b), IFN-γ, IL-10, IL-12, or IL-23) or variant thereof, wherein the antibody comprises a heavy chain comprising a hinge region, and wherein the cytokine or variant thereof is positioned at the hinge region (e.g., within the hinge region, or between the C-terminus of CH1 and the N-terminus of the hinge region) of the heavy chain. In some embodiments, there is provided a method of treating a cancer in an individual (e.g., human), or a method of selectively directing cytokine activity to an immune cell (e.g., T cell, B cell, monocyte, NK cell, myeloid DC cell, plasma DC cell, macrophage) in an individual (e.g., human), comprising administering to the individual an effective amount of an immunocytokine (or pharmaceutical composition thereof) selected from the group consisting of: IL-2/anti-PD-L1 immunocytokine, IL-10/anti-PD-L1 immunocytokine, IL-12/anti-PD-L1 immunocytokine, IL-23/anti-PD-L1 immunocytokine, IFN-γ/anti-PD-L1 immunocytokine, IFN-α/anti-PD-L1 immunocytokine, IL-2/anti-PD-1 immunocytokine, IL-10/anti-PD-1 immunocytokine, IL-12/anti-PD-1 immunocytokine, IL-23/anti-PD-1 immunocytokine, IFN-γ/anti-PD-1 immunocytokine, IFN-α/anti-PD-1 immunocytokine, IL-2/anti-CTLA-4 immunocytokine, IL-10/anti-CTLA-4 immunocytokine, IL-12/anti-CTLA-4 immunocytokine, IL-23/anti-CTLA-4 immunocytokine, IFN-γ/anti-CTLA-4 immunocytokine, IFN-α/anti-CTLA-4 immunocytokine, IL-2/anti-CD3 immunocytokine, IL-10/anti-CD3 immunocytokine, IL-12/anti-CD3 immunocytokine, IL-23/anti-CD3 immunocytokine, IFN-γ/anti-CD3 immunocytokine, IFN-α/anti-CD3 immunocytokine, IL-2/anti-CD4 immunocytokine, IL-10/anti-CD4 immunocytokine, IL-12/anti-CD4 immunocytokine, IL-23/anti-CD4 immunocytokine, IFN-γ/anti-CD4 immunocytokine, IFN-α/anti-CD4 immunocytokine, IL-2/anti-CD8 immunocytokine, IL-10/anti-CD8 immunocytokine, IL-12/anti-CD8 immunocytokine, IL-23/anti-CD8 immunocytokine, IFN-γ/anti-CD8 immunocytokine, IFN-α/anti-CD8 immunocytokine, IL-2/anti-CD25 immunocytokine, IL-10/anti-CD25 immunocytokine, IL-12/anti-CD25 immunocytokine, IL-23/anti-CD25 immunocytokine, IFN-γ/anti-CD25 immunocytokine, IFN-α/anti-CD25 immunocytokine, IL-2/PD-L2-Fc immunocytokine, IL-10/PD-L2-Fc immunocytokine, IL-12/PD-L2-Fc immunocytokine, IL-23/PD-L2-Fc immunocytokine, IFN-γ/PD-L2-Fc immunocytokine, and IFN-α/PD-L2-Fc immunocytokine. In some embodiments, the immunocytokine or pharmaceutical composition thereof is administered intravenously, subcutaneously, or intratumorally. In some embodiments, the immunocytokine or pharmaceutical composition thereof is administered in an amount of about 1 μg/kg to about 10 mg/kg. In some embodiments, the immunocytokine or pharmaceutical composition thereof is administered once every three weeks. In some embodiments, the cancer is selected from the group consisting of lung cancer, liver cancer, renal cancer, colorectal cancer, ovarian cancer, breast cancer, pancreatic cancer, gastric carcinoma, bile duct cancer, squamous cell carcinoma, bladder cancer, esophageal cancer, mesothelioma, melanoma, head and neck cancer, thyroid cancer, sarcoma, prostate cancer, glioblastoma, cervical cancer, thymic carcinoma, leukemia, lymphoma, myeloma, mycoses fungoides, and merkel cell cancer. In some embodiments, the cancer is PD-L1+ and/or PD-L2+ cancer.

[0452] In some embodiments, the method of treating cancer has one or more of the following biological activities: (1) killing cancer cells; (2) inhibiting proliferation of cancer cells; (3) inducing immune response in a tumor (e.g., inducing infiltration of immune effector cells to tumor site, inducing immune cell proliferation, differentiation and/or activation, and/or inducing pro-inflammatory cytokine secretion by immune cells); (4) reducing tumor size; (5) alleviating one or more symptoms in an individual having cancer; (6) inhibiting tumor metastasis; (7) prolonging survival; (8) prolonging time to cancer progression; and (9) preventing, inhibiting, or reducing the likelihood of the recurrence of a cancer. In some embodiments, the method of killing cancer cells mediated by the immunocytokine or pharmaceutical composition described herein can achieve a tumor cell death rate of at least about any of 10%, 20%, 30%, 40%, 50%, 60%, 70%, 80%, 90%, 95%, or more. In some embodiments, the method of reducing tumor size mediated by the immunocytokine or pharmaceutical composition described herein can reduce at least about 10% (including for example at least about any of 20%, 30%, 40%, 60%, 70%, 80%, 90%, or 100%) of the tumor size. In some embodiments, the method of inhibiting tumor metastasis mediated by the immunocytokine or pharmaceutical composition described herein can inhibit at least about 10% (including for example at least about any of 20%, 30%, 40%, 60%, 70%, 80%, 90%, or 100%) of the metastasis. In some embodiments, the method of prolonging survival of an individual (e.g., human) mediated by the immunocytokine or pharmaceutical composition described herein can prolongs the survival of the individual by at least any of 1, 2, 3, 4, 5, 6, 7, 8, 9, 10, 11, 12, 18, or 24 months. In some embodiments, the method of prolonging time to cancer progression mediated by the immunocytokine or pharmaceutical composition described herein can prolong the time to cancer progression by at least any of 1, 2, 3, 4, 5, 6, 7, 8, 9, 10, 11, or 12 weeks. In some embodiments, the method of inducing immune response to a tumor can increase, enhance, or stimulate an immune response or function in a subject. In some embodiments, the immune response or function is increased, enhanced, and/or stimulated by activating effector cells (e.g., T cells, e.g., CD8+ and/or CD4+ T cells), expanding (increasing) an effector cell population, and/or killing target cells (e.g., target tumor cells) in the subject. In some embodiments, the CD4 and/or CD8 T cells in the individual have increased or enhanced priming, activation, proliferation, cytokine release and/or cytolytic activity relative to prior to the administration of the immunocytokine or pharmaceutical composition described herein.

[0453] The methods described herein are suitable for treating a variety of cancers, including both solid cancer and liquid cancer. The methods are applicable to cancers of all stages, including early stage cancer, non-metastatic cancer, primary cancer, advanced cancer, locally advanced cancer, metastatic cancer, or cancer in remission. The methods described herein may be used as a first therapy, second therapy, third therapy, or combination therapy with other types of cancer therapies known in the art, such as surgery, radiation, chemotherapy, immunotherapy, hormone therapy, or a combination thereof. In some embodiments, the method is used to treat an individual who has previously been treated. In some embodiments, the cancer has been refractory to prior therapy. In some embodiments, the method is used to treat an individual who has not previously been treated.

[0454] In some embodiments, the cancer is partially resistant to immune checkpoint inhibitor monotherapy (e.g., partially resistant to anti-PD-1 or anti-PD-L1 antibody monotherapy treatment).

[0455] In some embodiments, the cancer is a HER2-positive cancer, and the method comprises administering to the individual (e.g., human) an effective amount of any suitable immunocytokines described herein, such as any of IL-2/anti-HER2 immunocytokine, IL-10/anti-HER2 immunocytokine, IL-23/anti-HER2 immunocytokine, IL-12/anti-HER2 immunocytokine, IFN-γ/anti-HER2 immunocytokine, IFN-α/anti-HER2 immunocytokine, IL-2/anti-PD-1 immunocytokine, IL-10/anti-PD-1 immunocytokine, IL-23/anti-PD-1 immunocytokine, IL-12/anti-PD-1 immunocytokine, IFN-γ/anti-PD-1 immunocytokine, IFN-α/anti-PD-1 immunocytokine, IL-2/anti-PD-L1 immunocytokine, IL-10/anti-PD-L1 immunocytokine, IL-12/anti-PD-L1 immunocytokine, IL-23/anti-PD-L1 immunocytokine, IFN-γ/anti-PD-L1 immunocytokine, IFN-α/anti-PD-L1 immunocytokine, IL-2/anti-CTLA-4 immunocytokine, IL-10/anti-CTLA-4 immunocytokine, IL-12/anti-CTLA-4 immunocytokine, IL-23/anti-CTLA-4 immunocytokine, IFN-γ/anti-CTLA-4 immunocytokine, IFN-α/anti-CTLA-4 immunocytokine, IL-2/anti-CD3 immunocytokine, IL-10/anti-CD3 immunocytokine, IL-12/anti-CD3 immunocytokine, IL-23/anti-CD3 immunocytokine, IFN-γ/anti-CD3 immunocytokine, IFN-α/anti-CD3 immunocytokine, IL-2/anti-CD4 immunocytokine, IL-10/anti-CD4 immunocytokine, IL-12/anti-CD4 immunocytokine, IL-23/anti-CD4 immunocytokine, IFN-γ/anti-CD4 immunocytokine, IFN-α/anti-CD4 immunocytokine, IL-2/anti-CD8 immunocytokine, IL-10/anti-CD8 immunocytokine, IL-12/anti-CD8 immunocytokine, IL-23/anti-CD8 immunocytokine, IFN-γ/anti-CD8 immunocytokine, IFN-α/anti-CD8 immunocytokine, IL-2/anti-CD25 immunocytokine, IL-10/anti-CD25 immunocytokine, IL-12/anti-CD25 immunocytokine, IL-23/anti-CD25 immunocytokine, IFN-γ/anti-CD25 immunocytokine, IFN-α/anti-CD25 immunocytokine, IL-2/PD-L2-Fc immunocytokine, IL-10/PD-L2-Fc immunocytokine, IL-12/PD-L2-Fc immunocytokine, IL-23/PD-L2-Fc immunocytokine, IFN-γ/PD-L2-Fc immunocytokine, IFN-α/PD-L2-Fc immunocytokine. In some embodiments, the HER2-positive cancer is breast cancer or gastric cancer. In some embodiments, the HER2-positive breast cancer is early-stage breast cancer. In some embodiments, the HER2-positive breast cancer is metastatic breast cancer. In some embodiments, the HER2-positive cancer is recurrent cancer. In some embodiments, the recurrent cancer is locally recurrent cancer. In some embodiments, the HER2-positive cancer is advanced cancer. In some embodiments, the HER2-positive cancer is non-resectable.

[0456] In some embodiments, the cancer is a PD-L1 expressing cancer, and the method comprises administering to the individual (e.g., human) an effective amount of any suitable immunocytokines described herein, such as any of IL-2/anti-HER2 immunocytokine, IL-10/anti-HER2 immunocytokine, IL-12/anti-HER2 immunocytokine, IL-23/anti-HER2 immunocytokine, IFN-γ/anti-HER2 immunocytokine, IFN-α/anti-HER2 immunocytokine, IL-2/anti-PD-1 immunocytokine, IL-10/anti-PD-1 immunocytokine, IL-12/anti-PD-1 immunocytokine, IL-23/anti-PD-1 immunocytokine, IFN-γ/anti-PD-1 immunocytokine, IFN-α/anti-PD-1 immunocytokine, IL-2/anti-PD-L1 immunocytokine, IL-10/anti-PD-L1 immunocytokine, IL-12/anti-PD-L1 immunocytokine, IL-23/anti-PD-L1 immunocytokine, IFN-γ/anti-PD-L1 immunocytokine, IFN-α/anti-PD-L1 immunocytokine, IL-2/anti-CTLA-4 immunocytokine, IL-10/anti-CTLA-4 immunocytokine, IL-12/anti-CTLA-4 immunocytokine, IL-23/anti-CTLA-4 immunocytokine, IFN-γ/anti-CTLA-4 immunocytokine, IFN-α/anti-CTLA-4 immunocytokine, IL-2/anti-CD3 immunocytokine, IL-10/anti-CD3 immunocytokine, IL-12/anti-CD3 immunocytokine, IL-23/anti-CD3 immunocytokine, IFN-γ/anti-CD3 immunocytokine, IFN-α/anti-CD3 immunocytokine, IL-2/anti-CD4 immunocytokine, IL-10/anti-CD4 immunocytokine, IL-12/anti-CD4 immunocytokine, IL-23/anti-CD4 immunocytokine, IFN-γ/anti-CD4 immunocytokine, IFN-α/anti-CD4 immunocytokine, IL-2/anti-CD8 immunocytokine, IL-10/anti-CD8 immunocytokine, IL-12/anti-CD8 immunocytokine, IL-23/anti-CD8 immunocytokine, IFN-γ/anti-CD8 immunocytokine, IFN-α/anti-CD8 immunocytokine, IL-2/anti-CD25 immunocytokine, IL-10/anti-CD25 immunocytokine, IL-12/anti-CD25 immunocytokine, IL-23/anti-CD25 immunocytokine, IFN-γ/anti-CD25 immunocytokine, IFN-α/anti-CD25 immunocytokine, IL-2/PD-L2-Fc immunocytokine, IL-10/PD-L2-Fc immunocytokine, IL-12/PD-L2-Fc immunocytokine, IL-23/PD-L2-Fc immunocytokine, IFN-γ/PD-L2-Fc immunocytokine, IFN-α/PD-L2-Fc immunocytokine. In some embodiments, the method is suitable for treating cancers with aberrant PD-1 or PD-L1/PD-L2 expression (e.g., HER2+ cancer), activity and/or signaling include, by way of non-limiting example, hematological cancer and/or solid tumors. Some cancers whose growth may be inhibited using the immunocytokines of the invention include cancers typically responsive to immunotherapy. Non-limiting examples of other cancers for treatment include melanoma (e.g., metastatic malignant melanoma), renal cancer (e.g., clear cell carcinoma), prostate cancer (e.g., hormone refractory prostate adenocarcinoma), breast cancer, colon cancer and lung cancer (e.g., non-small cell lung cancer). Additionally, the invention includes refractory or recurrent malignancies whose growth may be inhibited using the immunocytokines of the invention. The present invention is also useful for treatment of metastatic cancers, especially metastatic cancers that express PD-L1 (Iwai et al. (2005) Int. Immunol. 17:133-144). In some embodiments, the cancer with aberrant PD-1 or PD-L1/PD-L2 expression, activity and/or signaling is partially resistant to PD-1 or PD-L1 blockade (e.g., partially resistant to anti-PD-1 antibody or anti-PD-L1 antibody treatment).

[0457] In some embodiments, the methods described herein are suitable for treating a solid cancer selected from the group consisting of colon cancer, rectal cancer, renal-cell carcinoma, liver cancer, non-small cell carcinoma of the lung, cancer of the small intestine, cancer of the esophagus, melanoma, bone cancer, pancreatic cancer, skin cancer, cancer of the head or neck, cutaneous or intraocular malignant melanoma, uterine cancer, ovarian cancer, rectal cancer, cancer of the anal region, stomach cancer, testicular cancer, uterine cancer, carcinoma of the fallopian tubes, carcinoma of the endometrium, carcinoma of the cervix, carcinoma of the vagina, carcinoma of the vulva, Hodgkin's Disease, non-Hodgkin's lymphoma (NHL), cutaneous T-cell lymphoma (CTCL), cancer of the endocrine system, cancer of the thyroid gland, cancer of the parathyroid gland, cancer of the adrenal gland, sarcoma of soft tissue, cancer of the urethra, cancer of the penis, solid tumors of childhood, cancer of the bladder, cancer of the kidney or ureter, carcinoma of the renal pelvis, neoplasm of the central nervous system (CNS), primary CNS lymphoma, tumor angiogenesis, spinal axis tumor, brain stem glioma, pituitary adenoma, Kaposi's sarcoma, epidermoid cancer, squamous cell cancer, T-cell lymphoma, environmentally induced cancers, combinations of said cancers, and metastatic lesions of said cancers.

[0458] In some embodiments, the methods described herein are suitable for treating a hematologic cancer chosen from one or more of acute myeloid leukemia (AML), chronic lymphocytic leukemia (CLL), acute leukemias, acute lymphoid leukemia (ALL), B-cell acute lymphoid leukemia (B-ALL), T-cell acute lymphoid leukemia (T-ALL), chronic myelogenous leukemia (CML), B cell prolymphocytic leukemia, blastic plasmacytoid dendritic cell neoplasm, Burkitt's lymphoma, diffuse large B cell lymphoma, follicular lymphoma, hairy cell leukemia, small cell- or a large cell-follicular lymphoma, malignant lymphoproliferative conditions, MALT lymphoma, mantle cell lymphoma, marginal zone lymphoma, multiple myeloma, myelodysplasia and myelodysplastic syndrome, non-Hodgkin's lymphoma, Hodgkin's lymphoma, plasmablastic lymphoma, plasmacytoid dendritic cell neoplasm, Waldenstrom macroglobulinemia, or pre-leukemia.

[0459] In some embodiments, the methods described herein are for treating infection, e.g., fungal, viral, bacterial, protozoal, or other parasitic infection. The infection can be caused by any pathogen described above in the “Pathogen antigen” subsection. Thus in some embodiments, there is provided a method of treating an infection (e.g., viral, fungal, bacterial, protozoal, or other parasitic infection) in an individual (e.g., human), such as by selectively directing cytokine activity to an immune cell (e.g., T cell, B cell, monocyte, NK cell, myeloid DC cell, plasma DC cell, macrophage) in an individual (e.g., human), comprising administering to the individual an effective amount of any of the IL-2/anti-CD8 immunocytokines, IL-12/anti-CD8 immunocytokines, IL-10/anti-CD8 immunocytokines, IL-23/anti-CD8 immunocytokines, IFN-γ/anti-CD8 immunocytokines, IFN-α/anti-CD8 immunocytokines, IL-2/anti-CD3 immunocytokines, IL-10/anti-CD3 immunocytokines, IL-12/anti-CD3 immunocytokines, IL-23/anti-CD3 immunocytokines, IFN-γ/anti-CD3 immunocytokines, IFN-α/anti-CD3 immunocytokines, IL-2/anti-CD4 immunocytokines, IL-10/anti-CD4 immunocytokines, IL-12/anti-CD4 immunocytokines, IL-23/anti-CD4 immunocytokines, IFN-γ/anti-CD4 immunocytokines, IFN-α/anti-CD4 immunocytokines, IL-2/anti-CD25 immunocytokines, IL-10/anti-CD25 immunocytokines, IL-12/anti-CD25 immunocytokines, IL-23/anti-CD25 immunocytokines, IFN-γ/anti-CD25 immunocytokines, and IFN-α/anti-CD25 immunocytokines described herein, or pharmaceutical composition thereof. In some embodiments, there is provided a method of treating an infection (e.g., viral, fungal, bacterial, protozoal, or other parasitic infection) in an individual (e.g., human), such as by selectively directing cytokine activity to an immune cell (e.g., T cell, B cell, monocyte, NK cell, myeloid DC cell, plasma DC cell, macrophage) in an individual (e.g., human), comprising administering to the individual an effective amount of an immunocytokine (or pharmaceutical composition thereof) comprising: a) an antigen-binding protein (e.g., antibody such as full-length antibody, or antigen-binding fragment-hinge-Fc fusion protein such as ligand/receptor-hinge-Fc fusion protein) specifically recognizing a target antigen (e.g., CD123, CTLA-4, PD-L1, PD-L2, CD25, PD-1, CD3, CD4, or CD8); and b) a cytokine (e.g., IL-2, IFN-α (e.g., IFN-α2b), IFN-γ, IL-10, IL-12, or IL-23) or variant thereof, wherein the antigen-binding protein comprises an antigen-binding polypeptide (e.g., antibody heavy chain, or antigen-binding fragment-hinge-Fc fusion polypeptide such as ligand/receptor-hinge-Fc fusion polypeptide) comprising from N′ to C′: an antigen-binding fragment (e.g., ligand, receptor, VHH, scFv, or VH), a hinge region, and an Fc domain subunit or portion thereof (e.g., CH2+CH3, or CH2 only), and wherein the cytokine or variant thereof is positioned at (e.g., at the N′ of, at the C′ of, or within) the hinge region. In some embodiments, there is provided a method of treating an infection (e.g., viral, fungal, bacterial, protozoal, or other parasitic infection) in an individual (e.g., human), such as by selectively directing cytokine activity to an immune cell (e.g., T cell, B cell, monocyte, NK cell, myeloid DC cell, plasma DC cell, macrophage) in an individual (e.g., human), comprising administering to the individual an effective amount of an immunocytokine (or pharmaceutical composition thereof) comprising: a) an antibody (e.g., full-length antibody, heavy chain only antibody, or antigen-binding fragment fused to an Fc domain subunit or portion thereof via a hinge region) specifically recognizing a target antigen (e.g., CD25, CTLA-4, PD-L1, PD-L2, PD-1, CD3, CD4, CD123, or CD8); and b) a cytokine (e.g., IL-2, IFN-α (e.g., IFN-α2b), IFN-γ, IL-10, IL-12, or IL-23) or variant thereof, wherein the antibody comprises a heavy chain comprising a hinge region, and wherein the cytokine or variant thereof is positioned at the hinge region (e.g., within the hinge region, or between the C-terminus of CH1 and the N-terminus of the hinge region) of the heavy chain. In some embodiments, there is provided a method of treating an infection (e.g., viral, fungal, bacterial, protozoal, or other parasitic infection) in an individual (e.g., human), such as by selectively directing cytokine activity to an immune cell (e.g., T cell, B cell, monocyte, NK cell, myeloid DC cell, plasma DC cell, macrophage) in an individual (e.g., human), comprising administering to the individual an effective amount of an immunocytokine (or pharmaceutical composition thereof) comprising: a) a full-length antibody specifically recognizing a target antigen (e.g., CD25, CTLA-4, PD-L1, PD-L2, PD-1, CD3, CD4, CD123, or CD8); and b) a cytokine (e.g., IL-2, IFN-α (e.g., IFN-α2b), IFN-γ, IL-10, IL-12, or IL-23) or variant thereof, wherein the cytokine or variant thereof is positioned at the hinge region (e.g., within the hinge region, or between the C-terminus of CH1 and the N-terminus of the hinge region) of a heavy chain of the full-length antibody. In some embodiments, there is provided a method of treating an infection (e.g., viral, fungal, bacterial, protozoal, or other parasitic infection) in an individual (e.g., human), such as by selectively directing cytokine activity to an immune cell (e.g., T cell, B cell, monocyte, NK cell, myeloid DC cell, plasma DC cell, macrophage) in an individual (e.g., human), comprising administering to the individual an effective amount of an immunocytokine (or pharmaceutical composition thereof) comprising: a) an antigen-binding protein (e.g., antibody such as full-length antibody, or antigen-binding fragment-hinge-Fc fusion protein such as ligand/receptor-hinge-Fc fusion protein) specifically recognizing a target antigen on an immune cell (e.g., any immune cell surface antigen such as CD3, CD4, CD8, CD123, or CD25, or any immune checkpoint molecule expressed on immune cells such as PD-L1, PD-1, or CTLA-4); and b) a cytokine (e.g., any cytokine described herein, such as IL-2, IFN-α (e.g., IFN-α2b), IFN-γ, IL-10, IL-12, or IL-23) or variant thereof, wherein the antigen-binding protein comprises an antigen-binding polypeptide (e.g., antibody heavy chain, or antigen-binding fragment-hinge-Fc fusion polypeptide such as ligand/receptor-hinge-Fc fusion polypeptide) comprising from N′ to C′: an antigen-binding fragment (e.g., ligand, receptor, VHH, scFv, or VH), a hinge region, and an Fc domain subunit or portion thereof (e.g., CH2+CH3, or CH2 only), and wherein the cytokine or variant thereof is positioned at (e.g., at the N′ of, at the C′ of, or within) the hinge region. In some embodiments, there is provided a method of treating an infection (e.g., viral, fungal, bacterial, protozoal, or other parasitic infection) in an individual (e.g., human), such as selectively directing cytokine activity to an immune cell (e.g., T cell, B cell, monocyte, NK cell, myeloid DC cell, plasma DC cell, macrophage) in an individual (e.g., human), comprising administering to the individual an effective amount of an immunocytokine (or pharmaceutical composition thereof) comprising: a) an antibody (e.g., full-length antibody, heavy chain only antibody, or antigen-binding fragment fused to an Fc domain subunit or portion thereof via a hinge region) specifically recognizing a target antigen on an immune cell (e.g., any immune cell surface antigen such as CD3, CD4, CD8, CD123, or CD25, or any immune checkpoint molecule expressed on immune cells such as PD-L1, PD-1, or CTLA-4); and b) a cytokine (e.g., any cytokine described herein, such as IL-2, IFN-α (e.g., IFN-α2b), IFN-γ, IL-10, IL-12, or IL-23) or variant thereof, wherein the antibody comprises a heavy chain comprising a hinge region, and wherein the cytokine or variant thereof is positioned at the hinge region (e.g., within the hinge region, or between the C-terminus of CH1 and the N-terminus of the hinge region) of the heavy chain. In some embodiments, the immunocytokine or pharmaceutical composition thereof is administered intravenously or subcutaneously. In some embodiments, the immunocytokine or pharmaceutical composition thereof is administered in an amount of about 1 pg/kg to about 10 mg/kg. In some embodiments, the immunocytokine or pharmaceutical composition thereof is administered once every three weeks. In some embodiments, the method of treating infection described herein prevent worsening of, arrest and/or ameliorate at least one symptom of a pathogen infection in an individual in need thereof, reduce or eliminate pathogen, prevent damage to said individual or an organ or tissue of said individual, and/or prevent death. In some embodiments, the methods described herein can achieve one or more of the following: (a) controlling, ameliorating, and/or preventing tissue and/or organ injury or failure, such as induced by virus infection; (b) controlling, reducing, and/or inhibiting cell necrosis (such as reducing at least about 10% (including for example at least about any of 20%, 30%, 40%, 60%, 70%, 80%, 90%, or 100%) cell necrosis), such as necrosis in infected and/or non-infected tissue and/or organ; (c) controlling, and/or increasing the infiltration of inflammatory cells (e.g., NK cells, cytotoxic T cells, neutrophils) in infected tissues and/or organs, such as increasing at least about 10% (including for example at least about any of 20%, 30%, 40%, 60%, 70%, 80%, 90%, or 100%) inflammatory cell infiltration; (d) controlling, ameliorating and/or preventing inflammation in non-infected tissue and/or organ, systemic inflammation, and/or cytokine storm, such as downregulating at least about 10% (including for example at least about any of 20%, 30%, 40%, 60%, 70%, 80%, 90%, or 100%); (e) reducing mortality rate associated with pathogen infection, and/or preventing death, such as reducing at least about 10% (including for example at least about any of 20%, 30%, 40%, 60%, 70%, 80%, 90%, or 100%) death rate; and (f) reducing or eliminating at least about 10% (including for example at least about any of 20%, 30%, 40%, 60%, 70%, 80%, 90%, or 100%) pathogen.

[0460] In some embodiments, the methods described herein are for treating an immune disease, such as an autoimmune disease, or an immune suppression.

[0461] In some embodiments, the methods described herein are for treating immune suppression. Immunosuppression is a reduction or entirely absent of the activation or efficacy of the immune system, resulting in immune system's inability to fight diseases, for example infectious diseases or cancer. Immunosuppression can either be the result of diseases, or be produced by pharmaceuticals or an infection, resulting in an increased susceptibility to secondary infections by pathogens such as bacteria and viruses. Many diseases are characterized by the development of progressive immunosuppression in the patient. The presence of an impaired immune response in patients with malignancies (e.g. leukemia, lymphoma, multiple myeloma) is well documented. Progressive immunosuppression has also been observed in certain chronic infection such as AIDS, sepsis, leprosy, cytomegalovirus infections, malaria, lupus, and the like.

[0462] Immunodeficiency is also a potential adverse effect of many therapeutic treatments (radiotherapy or chemotherapy for example). By means of example and not limitation, diseases and conditions associated with immunodeficiency or immunosuppression comprise: human immunodeficiency virus (HV) infection and acquired immune deficiency syndrome (AIDS), hypogammaglobulinemia, hematologic cancers such as leukaemia and lymphoma, lymphocytopenia (lymphopenia) of any origin, lupus erythematosus, cachexia, opioids abuse, mastocytosis, rheumatic fever, trypanosomiasis, and alcohol abuse. In some embodiments, immunosuppression is associated with immune checkpoint signaling (e.g., PD-1 or CTLA-4 signaling). In such non-deliberate immunosuppression situations, patients are usually treated with immunostimulants (e.g. cytokines) to boost immune system. However, due to the lack of specificity, such immunostimulants activate the immune system in general and may trigger an overactivation of the immune system.

[0463] Thus in some embodiments, there is provided a method of treating an immune suppression in an individual (e.g., human), such as by selectively directing cytokine activity (e.g., immunostimulatory or pro-inflammatory cytokine activity) to an immune cell (e.g., T cell, B cell, monocyte, NK cell, myeloid DC cell, plasma DC cell, macrophage) in an individual (e.g., human), comprising administering to the individual an effective amount of any of the IL-2/anti-PD-L1 immunocytokine, IL-10/anti-PD-L1 immunocytokine, IL-12/anti-PD-L1 immunocytokine, IL-23/anti-PD-L1 immunocytokine, IFN-γ/anti-PD-L1 immunocytokine, IFN-α/anti-PD-L1 immunocytokine, IL-2/PD-L2-Fc immunocytokine, IL-10/PD-L2-Fc immunocytokine, IL-12/PD-L2-Fc immunocytokine, IL-23/PD-L2-Fc immunocytokine, IFN-γ/PD-L2-Fc immunocytokine, IFN-α/PD-L2-Fc immunocytokine, IL-2/anti-PD-1 immunocytokines, IL-12/anti-PD-1 immunocytokines, IL-23/anti-PD-1 immunocytokines, IFN-γ/anti-PD-1 immunocytokines, IFN-α/anti-PD-1 immunocytokines, IL-2/anti-CTLA-4 immunocytokines, IL-12/anti-CTLA-4 immunocytokines, IL-23/anti-CTLA-4 immunocytokines, IFN-γ/anti-CTLA-4 immunocytokines, IFN-α/anti-CTLA-4 immunocytokines, IL-2/anti-CD3 immunocytokines, IL-12/anti-CD3 immunocytokines, IL-23/anti-CD3 immunocytokines, IFN-γ/anti-CD3 immunocytokines, IFN-α/anti-CD3 immunocytokines, IL-2/anti-CD4 immunocytokines, IL-12/anti-CD4 immunocytokines, IL-23/anti-CD4 immunocytokines, IFN-γ/anti-CD4 immunocytokines, IFN-α/anti-CD4 immunocytokines, IL-2/anti-CD8 immunocytokines, IL-12/anti-CD8 immunocytokines, IL-23/anti-CD8 immunocytokines, IFN-γ/anti-CD8 immunocytokines, IFN-α/anti-CD8 immunocytokines, IL-2/anti-CD25 immunocytokines, IL-12/anti-CD25 immunocytokines, IL-23/anti-CD25 immunocytokines, IFN-γ/anti-CD25 immunocytokines, and IFN-α/anti-CD25 immunocytokines described herein, or pharmaceutical composition thereof. In some embodiments, there is provided a method of treating an immune suppression in an individual (e.g., human), such as by selectively directing cytokine activity (e.g., immunostimulatory or pro-inflammatory cytokine activity) to an immune cell (e.g., T cell, B cell, monocyte, NK cell, myeloid DC cell, plasma DC cell, macrophage) in an individual (e.g., human), comprising administering to the individual an effective amount of an immunocytokine (or pharmaceutical composition thereof) comprising: ) an antigen-binding protein (e.g., antibody such as full-length antibody, or antigen-binding fragment-hinge-Fc fusion protein such as ligand/receptor-hinge-Fc fusion protein) specifically recognizing a target antigen (e.g., PD-1, PD-L1, CTLA-4, CD3, CD4, CD8, CD123, or CD25) on an immune cell; and b) an immunostimulatory cytokine (e.g., IL-2, IFN-α (e.g., IFN-α2b), IFN-γ, IL-12, or IL-23) or variant thereof, wherein the antigen-binding protein comprises an antigen-binding polypeptide (e.g., antibody heavy chain, or antigen-binding fragment-hinge-Fc fusion polypeptide such as ligand/receptor-hinge-Fc fusion polypeptide) comprising from N′ to C′: an antigen-binding fragment (e.g., ligand, receptor, VHH, scFv, or VH), a hinge region, and an Fc domain subunit or portion thereof (e.g., CH2+CH3, or CH2 only), and wherein the cytokine or variant thereof is positioned at (e.g., at the N′ of, at the C′ of, or within) the hinge region. In some embodiments, there is provided a method of treating an immune suppression in an individual (e.g., human), such as by selectively directing cytokine activity (e.g., immunostimulatory or pro-inflammatory cytokine activity) to an immune cell (e.g., T cell, B cell, monocyte, NK cell, myeloid DC cell, plasma DC cell, macrophage) in an individual (e.g., human), comprising administering to the individual an effective amount of an immunocytokine (or pharmaceutical composition thereof) comprising: a) an antibody (e.g., full-length antibody, heavy chain only antibody, or antigen-binding fragment fused to an Fc domain subunit or portion thereof via a hinge region) specifically recognizing a target antigen (e.g., PD-1, PD-L1, CTLA-4, CD3, CD4, CD8, CD123, or CD25) on an immune cell; and b) an immunostimulatory cytokine (e.g., IL-2, IFN-α (e.g., IFN-α2b), IFN-γ, IL-12, or IL-23) or variant thereof, wherein the antibody comprises a heavy chain comprising a hinge region, and wherein the cytokine or variant thereof is positioned at the hinge region (e.g., within the hinge region, or between the C-terminus of CH1 and the N-terminus of the hinge region) of the heavy chain. In some embodiments, there is provided a method of treating an immune suppression in an individual (e.g., human), such as by selectively directing cytokine activity (e.g., immunostimulatory or pro-inflammatory cytokine activity) to an immune cell (e.g., T cell, B cell, monocyte, NK cell, myeloid DC cell, plasma DC cell, macrophage), comprising administering to the individual an effective amount of an immunocytokine (or pharmaceutical composition thereof) comprising: a) a full-length antibody specifically recognizing a target antigen (e.g., PD-1, PD-L1, CTLA-4, CD3, CD4, CD8, CD123, or CD25) on an immune cell; and b) an immunostimulatory cytokine (e.g., IL-2, IFN-α (e.g., IFN-α2b), IFN-γ, IL-12, or IL-23) or variant thereof, wherein the cytokine or variant thereof is positioned at the hinge region (e.g., between the C-terminus of CH1 and the N-terminus of the hinge region) of a heavy chain of the full-length antibody. In some embodiments, the immunocytokine or pharmaceutical composition thereof is administered intravenously, subcutaneously, or intratumorally. In some embodiments, the immunocytokine or pharmaceutical composition thereof is administered in an amount of about 1 μg/kg to about 10 mg/kg. In some embodiments, the immunocytokine or pharmaceutical composition thereof is administered once every three weeks. In some embodiments, the methods of treating an immune suppression described herein activate or enhance immune response, increase CD8 to CD4 ratio, promote immune cell proliferation and/or differentiation, induce or enhance cytokine release (e.g., IL-2, IL-6, IFN-γ), prevent worsening of, arrest and/or ameliorate at least one symptom of an immune suppression in an individual in need thereof, and/or prevent death.

[0464] In some embodiments, the methods described herein are for treating autoimmune diseases. Autoimmune disease is a disease resulting from an immune response against a self-tissue or tissue component, including both self-antibody responses and cell-mediated responses. The term “autoimmune disease,” as used herein, encompasses organ-specific autoimmune diseases, in which an autoimmune response is directed against a single tissue, such as type I diabetes mellitus (T1D), Crohn's disease, ulcerative colitis, myasthenia gravis, vitiligo, Graves' disease, Hashimoto's disease, Addison's disease and autoimmune gastritis and autoimmune hepatitis. The term “autoimmune disease” also encompasses non-organ specific autoimmune diseases, in which an autoimmune response is directed against a component present in several or many organs throughout the body. Such autoimmune diseases include, for example, rheumatoid disease, systemic lupus erythematosus, progressive systemic sclerosis and variants, polymyositis and dermatomyositis. Additional autoimmune diseases include pernicious anemia including some of autoimmune gastritis, primary biliary cirrhosis, autoimmune thrombocytopenia, Sjogren's syndrome, multiple sclerosis and psoriasis. In some embodiments, the autoimmune disease is selected from the group consisting of diabetes, diabetes mellitus, arthritis (including rheumatoid arthritis, juvenile rheumatoid arthritis, osteoarthritis, psoriatic arthritis), multiple sclerosis, myasthenia gravis, systemic lupus erythematosis, autoimmune thyroiditis, dermatitis (including atopic dermatitis and eczematous dermatitis), psoriasis, Sjogren's Syndrome, including keratoconjunctivitis sicca secondary to Sjogren's Syndrome, alopecia greata, allergic responses due to arthropod bite reactions, Crohn's disease, aphthous ulcer, iritis, conjunctivitis, keratoconjunctivitis, ulcerative colitis, asthma, allergic asthma, cutaneous lupus erythematosus, scleroderma, vaginitis, proctitis, drug eruptions, leprosy reversal reactions, erythema nodosum leprosum, autoimmune uveitis, allergic encephalomyelitis, acute necrotizing hemorrhagic encephalopathy, idiopathic bilateral progressive sensorineural hearing loss, aplastic anemia, pure red cell anemia, idiopathic thrombocytopenia, polychondritis, Wegener's granulomatosis, chronic active hepatitis, Stevens-Johnson syndrome, idiopathic sprue, lichen planus, inflammatory bowel disease (IBD), Crohn's disease, Graves ophthalmopathy, sarcoidosis, primary biliary cirrhosis, uveitis posterior, and interstitial lung fibrosis. One skilled in the art understands that the methods of the invention can be applied to these or other autoimmune diseases, as desired.

[0465] Thus in some embodiments, there is provided a method of treating an autoimmune disease in an individual (e.g., human), such as by selectively directing cytokine activity (e.g., immunosuppressive or anti-inflammatory cytokine activity) to an immune cell (e.g., T cell, B cell, monocyte, NK cell, myeloid DC cell, plasma DC cell, macrophage) in an individual (e.g., human), comprising administering to the individual an effective amount of any of the IL-10/anti-CD4 immunocytokines, IL-10/anti-CD3 immunocytokines, IL-10/anti-CD8 immunocytokines, IL-10/anti-CD25 immunocytokines, IL-10/anti-PD-1 immunocytokines, IL-10/anti-PD-L1 immunocytokines, IL-10/anti-CTLA-4 immunocytokines, and IL-10/PD-L2-Fc immunocytokines described herein, or pharmaceutical composition thereof. In some embodiments, there is provided a method of treating an autoimmune disease in an individual (e.g., human), such as by selectively directing cytokine activity (e.g., immunosuppressive or anti-inflammatory cytokine activity) to an immune cell (e.g., T cell, B cell, monocyte, NK cell, myeloid DC cell, plasma DC cell, macrophage) in an individual (e.g., human), comprising administering to the individual an effective amount of an immunocytokine (or pharmaceutical composition thereof) comprising: a) an antigen-binding protein (e.g., antibody such as full-length antibody, or antigen-binding fragment-hinge-Fc fusion protein such as ligand/receptor-hinge-Fc fusion protein) specifically recognizing a target antigen (e.g., PD-1, PD-L1, CTLA-4, CD3, CD4, CD8, or CD25) on an immune cell; and b) an immunosuppressive cytokine (e.g., IL-10, IL-27, IL-35, or TGF-β) or variant thereof, wherein the antigen-binding protein comprises an antigen-binding polypeptide (e.g., antibody heavy chain, or antigen-binding fragment-hinge-Fc fusion polypeptide such as ligand/receptor-hinge-Fc fusion polypeptide) comprising from N′ to C′: an antigen-binding fragment (e.g., ligand, receptor, VHH, scFv, or VH), a hinge region, and an Fc domain subunit or portion thereof (e.g., CH2+CH3, or CH2 only), and wherein the cytokine or variant thereof is positioned at (e.g., at the N′ of, at the C′ of, or within) the hinge region. In some embodiments, there is provided a method of treating an autoimmune disease in an individual (e.g., human), such as by selectively directing cytokine activity (e.g., immunosuppressive or anti-inflammatory cytokine activity) to an immune cell (e.g., T cell, B cell, monocyte, NK cell, myeloid DC cell, plasma DC cell, macrophage) in an individual (e.g., human), comprising administering to the individual an effective amount of an immunocytokine (or pharmaceutical composition thereof) comprising: a) an antibody (e.g., full-length antibody, heavy chain only antibody, or antigen-binding fragment fused to an Fc domain subunit or portion thereof via a hinge region) specifically recognizing a target antigen (e.g., PD-1, CTLA-4, PD-L1, CD3, CD4, CD123, CD25, or CD8) on an immune cell; and b) an immunosuppressive cytokine (e.g., IL-10, IL-27, IL-35, or TGF-β) or variant thereof, wherein the antibody comprises a heavy chain comprising a hinge region, and wherein the cytokine or variant thereof is positioned at the hinge region (e.g., within the hinge region, or between the C-terminus of CH1 and the N-terminus of the hinge region) of the heavy chain. In some embodiments, there is provided a method of treating an autoimmune disease in an individual (e.g., human), such as by selectively directing cytokine activity (e.g., immunosuppressive or anti-inflammatory cytokine activity) to an immune cell (e.g., T cell, B cell, monocyte, NK cell, myeloid DC cell, plasma DC cell, macrophage) in an individual (e.g., human), comprising administering to the individual an effective amount of an immunocytokine (or pharmaceutical composition thereof) comprising: a) a full-length antibody specifically recognizing a target antigen (e.g., CTLA-4, PD-L1, PD-1, CD3, CD4, CD123, CD25, or CD8) on an immune cell; and b) an immunosuppressive cytokine (e.g., IL-10, IL-27, IL-35, or TGF-β) or variant thereof, wherein the cytokine or variant thereof is positioned at the hinge region (e.g., within the hinge region, or between the C-terminus of CH1 and the N-terminus of the hinge region) of a heavy chain of the full-length antibody. In some embodiments, the immunocytokine or pharmaceutical composition thereof is administered intravenously, subcutaneously, or intratumorally. In some embodiments, the immunocytokine or pharmaceutical composition thereof is administered in an amount of about 1 μg/kg to about 10 mg/kg. In some embodiments, the immunocytokine or pharmaceutical composition thereof is administered once every three weeks. In some embodiments, the methods of treating an autoimmune disease described herein prevent worsening of, arrest and/or ameliorate at least one symptom of an autoimmune disease in an individual in need thereof, prevent damage to healthy self tissues or organ, control, ameliorate and/or prevent infiltration of immune cells to healthy self tissue and/or organ, systemic inflammation, and/or cytokine storm, and/or prevent death.

[0466] In some embodiments, there is provided a method of treating a graft rejection or GvHD in an individual (e.g., human), such as by selectively directing cytokine activity (e.g., immunosuppressive or anti-inflammatory cytokine activity) to an immune cell (e.g., T cell, B cell, monocyte, NK cell, myeloid DC cell, plasma DC cell, macrophage) in an individual (e.g., human), comprising administering to the individual an effective amount of any of the IL-10/anti-CD4 immunocytokines, IL-10/anti-CD3 immunocytokines, IL-10/anti-CD8 immunocytokines, IL-10/anti-CD25 immunocytokines, IL-10/anti-PD-1 immunocytokines, IL-10/anti-PD-L1 immunocytokines, IL-10/anti-CTLA-4 immunocytokines, and IL-10/PD-L2-Fc immunocytokines described herein, or pharmaceutical composition thereof. In some embodiments, there is provided a method of treating a graft rejection or GvHD in an individual (e.g., human), such as by selectively directing cytokine activity (e.g., immunosuppressive or anti-inflammatory cytokine activity) to an immune cell (e.g., T cell, B cell, monocyte, NK cell, myeloid DC cell, plasma DC cell, macrophage) in an individual (e.g., human), comprising administering to the individual an effective amount of an immunocytokine (or pharmaceutical composition thereof) comprising: a) an antigen-binding protein (e.g., antibody such as full-length antibody, or antigen-binding fragment-hinge-Fc fusion protein such as ligand/receptor-hinge-Fc fusion protein) specifically recognizing a target antigen (e.g., PD-1, PD-L1, PD-L2, CTLA-4, CD3, CD4, CD8, CD123, or CD25) on an immune cell; and b) an immunosuppressive cytokine (e.g., IL-10, IL-27, IL-35, or TGF-β) or variant thereof, wherein the antigen-binding protein comprises an antigen-binding polypeptide (e.g., antibody heavy chain, or antigen-binding fragment-hinge-Fc fusion polypeptide such as ligand/receptor-hinge-Fc fusion polypeptide) comprising from N′ to C′: an antigen-binding fragment (e.g., ligand, receptor, VHH, scFv, or VH), a hinge region, and an Fc domain subunit or portion thereof (e.g., CH2+CH3, or CH2 only), and wherein the cytokine or variant thereof is positioned at (e.g., at the N′ of, at the C′ of, or within) the hinge region. In some embodiments, there is provided a method of treating a graft rejection or GvHD in an individual (e.g., human), such as by selectively directing cytokine activity (e.g., immunosuppressive or anti-inflammatory cytokine activity) to an immune cell (e.g., T cell, B cell, monocyte, NK cell, myeloid DC cell, plasma DC cell, macrophage) in an individual (e.g., human), comprising administering to the individual an effective amount of an immunocytokine (or pharmaceutical composition thereof) comprising: a) an antibody (e.g., full-length antibody, heavy chain only antibody, or antigen-binding fragment fused to an Fc domain subunit or portion thereof via a hinge region) specifically recognizing a target antigen (e.g., PD-1, PD-L1, PD-L2, CTLA-4, CD3, CD4, CD25, CD123, or CD8) on an immune cell; and b) an immunosuppressive cytokine (e.g., IL-10, IL-27, IL-35, or TGF-β) or variant thereof, wherein the antibody comprises a heavy chain comprising a hinge region, and wherein the cytokine or variant thereof is positioned at the hinge region (e.g., within the hinge region, or between the C-terminus of CH1 and the N-terminus of the hinge region) of the heavy chain. In some embodiments, there is provided a method of treating a graft rejection or GvHD in an individual (e.g., human), such as by selectively directing cytokine activity (e.g., immunosuppressive or anti-inflammatory cytokine activity) to an immune cell (e.g., T cell, B cell, monocyte, NK cell, myeloid DC cell, plasma DC cell, macrophage) in an individual (e.g., human), comprising administering to the individual an effective amount of an immunocytokine (or pharmaceutical composition thereof) comprising: a) a full-length antibody specifically recognizing a target antigen (e.g., CTLA-4, PD-L1, PD-L2, PD-1, CD3, CD4, CD25, CD123, or CD8) on an immune cell; and b) an immunosuppressive cytokine (e.g., IL-10, IL-27, IL-35, or TGF-β) or variant thereof, wherein the cytokine or variant thereof is positioned at the hinge region (e.g., within the hinge region, or between the C-terminus of CH1 and the N-terminus of the hinge region) of a heavy chain of the full-length antibody. In some embodiments, the immunocytokine or pharmaceutical composition thereof is administered intravenously, subcutaneously, or intratumorally. In some embodiments, the immunocytokine or pharmaceutical composition thereof is administered in an amount of about 1 μg/kg to about 10 mg/kg. In some embodiments, the immunocytokine or pharmaceutical composition thereof is administered once every three weeks. In some embodiments, the methods of treating a graft rejection described herein prevent worsening of, arrest and/or ameliorate at least one symptom of a graft rejection in an individual in need thereof; prevent damage to donor/foreign tissues or organ; control, ameliorate and/or prevent infiltration of immune cells to donor/foreign tissues or organ, systemic inflammation, and/or cytokine storm; reduce Th17 cell activation; improve graft survival; prolong survival, increase survival rate, and/or prevent death. In some embodiments, the methods of treating a GvHD described herein prevent worsening of, arrest and/or ameliorate at least one symptom of a GvHD in an individual in need thereof; reduce Th17 cell activation; prevent damage to self/healthy tissues or organ; control, ameliorate and/or prevent infiltration of immune cells to self/healthy tissues or organ, systemic inflammation, and/or cytokine storm; improve graft survival; prolong survival, increase survival rate, and/or prevent death; and/or improve disease activity score (see, e.g., P.J. Martin, Biol Blood Marrow Transplant. 2009 July; 15(7):777-784).

[0467] In some embodiments, there is provided a method of selectively activating the activity (binding affinity to corresponding cytokine receptor or subunit thereof, and/or biological activity) of a cytokine or variant thereof (e.g., IL-2, IFN-α (e.g., IFN-α2b), IFN-γ, IL-10, IL-12, or IL-23) to a cell expressing a target antigen (e.g., CTLA-4, PD-L1, PD-L2, CD123, CD25, HER2, PD-1, CD3, CD4, or CD8) in an individual (e.g., human), comprising administering to the individual an effective amount of an immunocytokine (or pharmaceutical compositions thereof), wherein the immunocytokine comprises: a) an antigen-binding protein (e.g., antibody such as full-length antibody, or antigen-binding fragment-hinge-Fc fusion protein such as ligand/receptor-hinge-Fc fusion protein) specifically recognizing a target antigen (e.g., CTLA-4, PD-L1, PD-L2, CD123, CD25, HER2, PD-1, CD3, CD4, or CD8); and b) a cytokine (e.g., IL-2, IFN-α (e.g., IFN-α2b), IFN-γ, IL-10, IL-12, or IL-23) or variant thereof, wherein the antigen-binding protein comprises an antigen-binding polypeptide (e.g., antibody heavy chain, or antigen-binding fragment-hinge-Fc fusion polypeptide such as ligand/receptor-hinge-Fc fusion polypeptide) comprising from N′ to C′: an antigen-binding fragment (e.g., ligand, receptor, VHH, scFv, or VH), a hinge region, and an Fc domain subunit or portion thereof (e.g., CH2+CH3, or CH2 only), wherein the cytokine or variant thereof is positioned at (e.g., at the N′ of, at the C′ of, or within) the hinge region; and wherein the activity of the cytokine or variant thereof is selectively activated upon binding of the antigen-binding protein to the target antigen. In some embodiments, there is provided a method of selectively activating the activity (binding affinity to corresponding cytokine receptor or subunit thereof, and/or biological activity) of a cytokine or variant thereof (e.g., IL-2, IFN-α (e.g., IFN-α2b), IFN-γ, IL-10, IL-12, or IL-23) to a cell expressing a target antigen (e.g., CTLA-4, PD-L1, PD-L2, CD25, CD123, HER2, PD-1, CD3, CD4, or CD8) in an individual (e.g., human), comprising administering to the individual an effective amount of an immunocytokine (or pharmaceutical compositions thereof), wherein the immunocytokine comprises: a) an antibody (e.g., full-length antibody, heavy chain only antibody, or antigen-binding fragment fused to an Fc domain subunit or portion thereof via a hinge region) specifically recognizing a target antigen (e.g., CTLA-4, PD-L1, PD-L2, CD25, CD123, HER2, PD-1, CD3, CD4, or CD8); and b) a cytokine (e.g., IL-2, IFN-α (e.g., IFN-α2b), IFN-γ, IL-10, IL-12, or IL-23) or variant thereof, wherein the antibody comprises a heavy chain comprising a hinge region, and wherein the cytokine or variant thereof is positioned at the hinge region (e.g., within the hinge region, or between the C-terminus of CH1 and the N-terminus of the hinge region) of the heavy chain; and wherein the activity of the cytokine or variant thereof is selectively activated upon binding of the antibody to the target antigen. In some embodiments, there is provided a method of selectively activating the activity (binding affinity to corresponding cytokine receptor or subunit thereof, and/or biological activity) of a cytokine or variant thereof (e.g., IL-2, IFN-α (e.g., IFN-α2b), IFN-γ, IL-10, IL-12, or IL-23) to a cell expressing a target antigen (e.g., CTLA-4, PD-L1, PD-L2, CD25, CD123, HER2, PD-1, CD3, CD4, or CD8) in an individual (e.g., human), comprising administering to the individual an effective amount of an immunocytokine (or pharmaceutical compositions thereof), wherein the immunocytokine comprises: a) an antibody (e.g., full-length antibody, or antigen-binding fragment fused to an Fc domain subunit or portion thereof via a hinge region) specifically recognizing a target antigen (e.g., CTLA-4, PD-L1, PD-L2, CD25, CD123, HER2, PD-1, CD3, CD4, or CD8); and b) a cytokine (e.g., IL-2, IFN-α (e.g., IFN-α2b), IFN-γ, IL-10, IL-12, or IL-23) or variant thereof, wherein the antibody comprises a heavy chain comprising from N-terminus to C-terminus: a VH domain, optionally a CH1 domain, the cytokine or variant thereof at a hinge region, a CH2 domain, and optionally a CH3 domain; and wherein the activity of the cytokine or variant thereof is selectively activated upon binding of the antibody to the target antigen. In some embodiments, there is provided a method of selectively activating the activity (binding affinity to corresponding cytokine receptor or subunit thereof, and/or biological activity) of a cytokine or variant thereof (e.g., IL-2, IFN-α (e.g., IFN-α2b), IFN-γ, IL-10, IL-12, or IL-23) to a cell expressing a target antigen (e.g., CTLA-4, PD-L1, PD-L2, CD25, CD123, HER2, PD-1, CD3, CD4, or CD8) in an individual (e.g., human), comprising administering to the individual an effective amount of an immunocytokine (or pharmaceutical compositions thereof), wherein the immunocytokine comprises: a) a full-length antibody specifically recognizing a target antigen (e.g., CTLA-4, PD-L1, PD-L2, CD25, CD123, HER2, PD-1, CD3, CD4, or CD8); and b) a cytokine (e.g., IL-2, IFN-α (e.g., IFN-α2b), IFN-γ, IL-10, IL-12, or IL-23) or variant thereof, wherein the cytokine or variant thereof is positioned at the hinge region (e.g., within the hinge region, or between the C-terminus of CH1 and the N-terminus of the hinge region) of a heavy chain of the full-length antibody; and wherein the activity of the cytokine or variant thereof is selectively activated upon binding of the full-length antibody to the target antigen. In some embodiments, in the presence of binding of the antigen-binding protein (e.g., antibody such as full-length antibody, or antigen-binding fragment-hinge-Fc fusion protein such as ligand/receptor-hinge-Fc fusion protein) or antigen-binding fragment (e.g., ligand, receptor, VHH, scFv, Fab) to the target antigen, the activity (binding affinity to corresponding cytokine receptor or subunit thereof, and/or biological activity) of the cytokine or variant thereof increases at least about 20% (such as at least about any of 30%, 40%, 50%, 60%, 70%, 80%, 90%, 100%, 200%, 300%, 400%, 500%, or more) compared to that in the absence of binding of the antigen-binding protein (e.g., antibody such as full-length antibody, or antigen-binding fragment-hinge-Fc fusion protein such as ligand/receptor-hinge-Fc fusion protein) or antigen-binding fragment (e.g., ligand, receptor, VHH, scFv, Fab) to the target antigen. In some embodiments, in the absence of binding of the antigen-binding protein (e.g., antibody such as full-length antibody, or antigen-binding fragment-hinge-Fc fusion protein such as ligand/receptor-hinge-Fc fusion protein or antigen-binding fragment (e.g., ligand, receptor, VHH, scFv, Fab) to the target antigen, the activity (binding affinity to corresponding cytokine receptor or subunit thereof, and/or biological activity) of the cytokine or variant thereof positioned at the hinge region of the heavy chain is no more than about 70% (such as no more than about any of 60%, 50%, 40%, 30%, 20%, 10%, 9%, 8%, 7%, 6%, 5%, 4%, 3%, 2%,, i⁰, 0.9%, 0.8%, 0.7%, 0.6%, 0.5%, 0.4%, 0.3%, 0.2%, 0.1%, or 0%) of that of a corresponding cytokine or variant thereof in a free state. In some embodiments, the cytokine or variant thereof is a cytokine variant, and wherein the activity (binding affinity to corresponding cytokine receptor or subunit thereof, and/or biological activity) of the cytokine variant in a free state is no more than about 80% (such as no more than about any of 70%, 60%, 50%, 40%, 30%, 20%, 10%, or 5%) of that of a corresponding wildtype cytokine in a free state.

[0468] Administration of the immunocytokines described herein or pharmaceutical compositions thereof may be carried out in any convenient manner, including by injection or transfusion. The route of administration is in accordance with known and accepted methods, such as by single or multiple bolus or infusion over a long period of time in a suitable manner. The immunocytokines or pharmaceutical compositions thereof may be administered to a patient transarterially, subcutaneously, intradermally, intratumorally, intranodally, intramedullary, intramuscularly, intravenously, or intraperitoneally. In some embodiments, the immunocytokine or pharmaceutical composition thereof is administered systemically. In some embodiments, the immunocytokine or pharmaceutical composition thereof is administered to an individual by infusion, such as intravenous infusion. Infusion techniques for immunotherapy are known in the art (see, e.g., Rosenberg et al., New Eng. J. of Med. 319: 1676 (1988)). In some embodiments, the immunocytokine or pharmaceutical composition thereof is administered to an individual by intradermal or subcutaneous (i.e., beneath the skin) injection. For subcutaneous injections, the immunocytokines or pharmaceutical compositions may be injected using a syringe. However, other devices for administration of the immunocytokines or pharmaceutical compositions are available such as injection devices; injector pens; auto-injector devices, needleless devices; and subcutaneous patch delivery systems. In some embodiments, the immunocytokine or pharmaceutical composition thereof is administered by intravenous injection. In some embodiments, the immunocytokine or pharmaceutical composition thereof is injected directly into a tumor, or a lymph node. In some embodiments, the immunocytokine or pharmaceutical composition thereof is administered locally to a site of tumor, such as directly into tumor cells, or to a tissue having tumor cells. In some embodiments, the immunocytokine or pharmaceutical composition thereof is administered by sustained release or extended-release means.

[0469] Dosages and desired drug concentration of pharmaceutical compositions of the present invention may vary depending on the particular use envisioned. The determination of the appropriate dosage or route of administration is well within the skill of an ordinary artisan. Animal experiments provide reliable guidance for the determination of effective doses for human therapy. Interspecies scaling of effective doses can be performed following the principles laid down by Mordenti, J. and Chappell, W. “The Use of Interspecies Scaling in Toxicokinetics,” In Toxicokinetics andNew Drug Development, Yacobi et al., Eds, Pergamon Press, New York 1989, pp. 42-46. It is within the scope of the present application that different formulations will be effective for different treatments and different disorders, and that administration intended to treat a specific organ or tissue may necessitate delivery in a manner different from that to another organ or tissue.

[0470] When in vivo administration of the immunocytokines described herein or pharmaceutical compositions thereof are used, normal dosage amounts may vary from about 1 μg/kg to about 10 mg/kg of mammal body weight depending upon the route of administration and mammal type. It is within the scope of the present application that different formulations will be effective for different treatments and different disorders, and that administration intended to treat a specific organ or tissue may necessitate delivery in a manner different from that to another organ or tissue. Moreover, dosages may be administered by one or more separate administrations, or by continuous infusion. For repeated administrations over several days or longer, depending on the condition, the treatment is sustained until a desired suppression of disease symptoms occurs. However, other dosage regimens may be useful. The progress of this therapy is easily monitored by conventional techniques and assays. In some embodiments, the immunocytokine described herein or pharmaceutical composition thereof is administered in an amount of about 1 μg/kg to about 10 mg/kg, such as any of about 1 μg/kg to about 500 μg/kg, about 500 μg/kg to about 1 mg/kg, about 1 mg/kg to about 10 mg/kg, about 1 μg/kg to about 1 mg/kg, about 1 μg/kg to about 200 μg/kg, about 100 μg/kg to about 500 μg/kg, about 100 μg/kg to about 1 mg/kg, or about 500 μg/kg to about 1 mg/kg.

[0471] In some embodiments, the immunocytokine described herein or pharmaceutical composition thereof is administered (e.g., infused) to the individual (e.g., human) over a period of time no more than about any of 24 hours, 20 hours, 15 hours, 10 hours, 8 hours, 6 hours, 3 hours, 2 hours, 1 hours, 30 minutes, or less. In some embodiments, the immunocytokine described herein or pharmaceutical composition thereof is administered (e.g., infused) to the individual (e.g., human) over a period of time of any one of about 30 minutes to about 1 hour, about 1 hour to about 2 hours, about 2 hours to about 4 hours, about 4 hours to about 6 hours, about 6 hours to about 8 hours, about 8 hours to about 10 hours, about 10 hours to about 12 hours, about 12 hours to about 18 hours, about 18 hours to about 24 hours, about 30 minutes to about 2 hours, about 2 hours to about 5 hours, about 5 hours to about 10 hours, about 10 hours to about 20 hours, about 30 minutes to about 10 hours, or about 30 minutes to about 24 hours.

[0472] In some embodiments, the immunocytokine described herein or pharmaceutical composition thereof is administered for a single time (e.g., bolus injection). In some embodiments, the immunocytokine described herein or pharmaceutical composition thereof is administered for multiple times (such as any of 2, 3, 4, 5, 6, or more times). If multiple administrations, they may be performed by the same or different routes and may take place at the same site or at alternative sites. The immunocytokine described herein or pharmaceutical composition thereof may be administered daily to once per year. The interval between administrations can be about any one of 24 hours to a year. Intervals can also be irregular (e.g., following tumor progression). In some embodiments, there is no break in the dosing schedule. The optimal dosage and treatment regime for a particular patient can readily be determined by one skilled in the art of medicine by monitoring the patient for signs of disease and adjusting the treatment accordingly. In some embodiments, the immunocytokine described herein or pharmaceutical composition thereof is administered once per day (daily), once per 2 days, once per 3 days, once per 4 days, once per 5 days, once per 6 days, once per week, once per 10 days, once every 2 weeks, once every 3 weeks, once every 4 weeks, once per month, once per 2 months, once per 3 months, once per 4 months, once per 5 months, once per 6 months, once per 7 months, once per 8 months, once per 9 months, or once per year. In some embodiments, the interval between administrations is about any one of 1 week to 2 weeks, 2 weeks to 1 month, 2 weeks to 2 months, 1 month to 2 months, 1 month to 3 months, 3 months to 6 months, or 6 months to a year. In some embodiments, the immunocytokine described herein or pharmaceutical composition thereof is administered once every three weeks.

[0473] In some embodiments, the pharmaceutical composition is administered in split doses, such as about any one of 2, 3, 4, 5, or more doses. In some embodiments, the split doses are administered over about a week, a month, 2 months, 3 months, or longer. In some embodiments, the dose is equally split. In some embodiments, the split doses are about 20%, about 30% and about 50% of the total dose. In some embodiments, the interval between consecutive split doses is about 1 day, 2 days, 3 days, 1 week, 2 weeks, 3 weeks, a month, or longer. For repeated administrations over several days or longer, depending on the condition, the treatment is sustained until a desired suppression of disease symptoms occurs. However, other dosage regimens may be useful. The progress of this therapy is easily monitored by conventional techniques and assays.

### VII. Articles of Manufacture and Kits

[0474] Further provided are kits, unit dosages, and articles of manufacture comprising any of the immunocytokines described herein. In some embodiments, a kit is provided which contains any one of the pharmaceutical compositions described herein and preferably provides instructions for its use, such as for use in the treatment of the disorders described herein (e.g., cancer, infection, or autoimmune disease).

[0475] Kits of the invention include one or more containers comprising an immunocytokine described herein for treating a disease. For example, the instructions comprise a description of administration of the immunocytokine to treat a disease, such as cancer. The kit may further comprise a description of selecting an individual (e.g., human) suitable for treatment based on identifying whether that individual has the disease and the stage of the disease. The instructions relating to the use of the immunocytokine generally include information as to dosage, dosing schedule, and route of administration for the intended treatment. The containers may be unit doses, bulk packages (e.g., multi-dose packages) or sub-unit doses. Instructions supplied in the kits of the invention are typically written instructions on a label or package insert (e.g., a paper sheet included in the kit), but machine-readable instructions (e.g., instructions carried on a magnetic or optical storage disk) are also acceptable. The kits of the present application are in suitable packaging. Suitable packaging includes, but is not limited to, vials, bottles, jars, flexible packaging (e.g., sealed Mylar or plastic bags), and the like. Also contemplated are packages for use in combination with a specific device, such as an infusion device such as a minipump. A kit may have a sterile access port (for example, the container may be an intravenous solution bag or a vial having a stopper pierceable by a hypodermic injection needle). At least one active agent in the composition is an immunocytokine as described herein. The container may further comprise a second pharmaceutically active agent. The kits may optionally provide additional components such as buffers and interpretive information. Normally, the kit comprises a container and a label or package insert(s) on or associated with the container.

[0476] The present application thus also provides articles of manufacture, which include vials (such as sealed vials), bottles, jars, flexible packaging, and the like. The article of manufacture can comprise a container and a label or package insert on or associated with the container. Suitable containers include, for example, bottles, vials, syringes, etc. The containers may be formed from a variety of materials such as glass or plastic. Generally, the container holds a composition which is effective for treating a disease or disorder (such as cancer) described herein, and may have a sterile access port (for example, the container may be an intravenous solution bag or a vial having a stopper pierceable by a hypodermic injection needle). The label or package insert indicates that the composition is used for treating the particular condition in an individual. The label or package insert will further comprise instructions for administering the composition to the individual. The label may indicate directions for reconstitution and/or use. The container holding the pharmaceutical composition may be a multi-use vial, which allows for repeat administrations (e.g. from 2-6 administrations) of the reconstituted formulation. Package insert refers to instructions customarily included in commercial packages of therapeutic products that contain information about the indications, usage, dosage, administration, contraindications and/or warnings concerning the use of such therapeutic products. Additionally, the article of manufacture may further comprise a second container comprising a pharmaceutically-acceptable buffer, such as bacteriostatic water for injection (BWFI), phosphate-buffered saline, Ringer's solution and dextrose solution. It may further include other materials desirable from a commercial and user standpoint, including other buffers, diluents, filters, needles, and syringes.

[0477] The kits or article of manufacture may include multiple unit doses of the pharmaceutical composition and instructions for use, packaged in quantities sufficient for storage and use in pharmacies, for example, hospital pharmacies and compounding pharmacies.

### EXAMPLES

[0478] The examples below are intended to be purely exemplary of the invention and should therefore not be considered to limit the invention in any way. The following examples and detailed description are offered by way of illustration and not by way of limitation.

### Example 1: Position of Cytokine or Variant Thereof within the Immunocytokine Affects Biological Activity of the Cytokine or Variant Thereof

### Construction of IL-2/Anti-HER2 Immunocytokines of Various Formats

[0479] Anti-HER2 antibody comprising trastuzumab (Herceptin®) VH (SEQ ID NO: 150) and VL (SEQ ID NO: 151) sequences was used as the parental full-length antibody (FIG. 1A), comprising two light chains each comprising the amino acid sequence of SEQ ID NO: 154. To construct heterodimer, one heavy chain comprises a hinge region comprising SEQ ID NO: 42, and an Fc domain subunit comprising SEQ ID NO: 61; the other heavy chain comprises a hinge region comprising SEQ ID NO: 41, and an Fc domain subunit comprising SEQ ID NO: 62. An IL-2 variant comprising R38D/K43E/E61R triple mutations (SEQ ID NO: 2) was used as the cytokine variant, which block the binding of IL-2 to IL-2Rα (CD25). The IL-2 variant was positioned at below positions for constructing various IL-2/anti-HER2 immunocytokines: i) an IL-2 variant was fused to the N-terminus of a subunit of the Fc fragment (see FIG. 1B for exemplary structure), hereinafter referred to as “IL-2 mutant-Fc-Her2 Ab”; ii) an IL-2 variant was fused to the C-terminus of a heavy chain of the anti-HER2 antibody (see FIG. 1C for exemplary structure), hereinafter referred to as “Fab-Fc-IL-2 mutant-Her2 Ab”; and iii) an IL-2 variant was positioned within the hinge region of a heavy chain of the anti-HER2 antibody (see FIG. 2A for exemplary structure), hereinafter referred to as “Fab-IL-2 mutant-Fc-Her2 Ab.” The Fab-IL-2 mutant-Fc-Her2 Ab immunocytokine comprises two light chains each comprising the amino acid sequence of SEQ ID NO: 154, one heavy chain comprising the amino acid sequence of SEQ ID NO: 155, and one heavy chain with the IL-2 variant positioned at the hinge region comprising the amino acid sequence of SEQ ID NO: 156.

[0480] Nucleic acids encoding various formats of IL-2/anti-HER2 immunocytokines were chemically synthesized, cloned into a lentiviral vector, and transfected into CHO cells for immunocytokine expression. Expressed immunocytokines were collected from supernatant, purified by protein A chromatography, and verified on SDS-PAGE for purity.

### IL-2 Signal Transduction Assay

[0481] HEK-Blue™ IL-2 Cells (InvivoGen Cat. #hkb-i12) and HEK-PD-1-IL-2 cells (generated in-house by overexpressing human PD-I in HEK-Blue™ IL-2 Cells using a lentiviral vector) were used to assess IL-2 signal activation activity of the various IL-2/anti-HER2 immunocytokines, following the InvivoGen user manual (InvivoGen Cat. #hkb-i12), hereinafter also referred to as “HEK-IL-2 reporter assay” or “HEK-PD-1-IL-2 reporter assay.” HEK-Blue™ IL-2 reporter cells and HEK-PD-1-IL-2 reporter cells stably express the human IL-2 receptor (human IL-2Rα, IL-2RD, and IL-2Rγ), along with the human JAK3 and STAT5 genes to obtain a fully functional IL-2 signaling pathway. In addition, these reporter cells also carry a STAT5-inducible secreted embryonic alkaline phosphatase (SEAP) reporter gene. Upon IL-2 stimulation, HEK-Blue™ IL-2 reporter cells and HEK-PD-1-IL-2 reporter cells trigger the activation of STAT5 and the subsequent secretion of SEAP, the levels of which can be monitored using QUANTI-Blue™ (InvivoGen Cat. #rep-qbs) colorimetric enzyme assay for alkaline phosphatase activity.

[0482] Briefly, HEK-Blue™ IL-2 cells were added to various IL-2/anti-HER2 immunocytokines in each plate well (or recombinant human IL-2 in a well as positive control, anti-HER2 antibody trastuzumab (Herceptin®) in a well as negative control), and incubated at 37° C. in a C02 incubator for 20-24 hours or overnight. After incubation, supernatant was transferred to fresh plate wells, added QUANTI-Blue™ solution, and incubated at 37° C. incubator for 30 minutes-3 hours. Then SEAP levels were determined using a spectrophotometer at 620-655 nm. The activity of recombinant human IL-2 (positive control) in activating IL-2 signaling pathway was measured as 10 unit/ng and served as a reference. Percent IL-2 signal transduction for various IL-2/anti-HER2 immunocytokines was calculated by dividing the IL-2/anti-HER2 immunocytokine readout by the recombinant human IL-2 readout.

### PBMC Proliferation Assay

[0483] Biological activity of IL-2 can also be tested by peripheral blood mononuclear cell (PBMC) proliferation/survival assay. IL-2 is essential for the proliferation and survival of activated T-cells. Human PBMCs (80,000 cells/well) were stimulated by an anti-CD3 antibody (OKT3, 0.5 pg/mL) in the presence of increasing concentrations of recombinant human IL-2 (“rIL-2”; 0, 0.04, 0.2, 1.0, or 5.0 ng/mL). 1 ng/mL of rIL-2 was determined to be the minimal concentration required for T-cell proliferation, based on PBMC cell number (≤80,000 cells/well) and viability after a 6-day culture. To determine the minimal concentration of IL-2/anti-HER2 immunocytokine required for T-cell proliferation, PBMCs (80,000 cells/well) were stimulated by an anti-CD3 antibody (OKT3, 0.5 μg/mL) in the presence of increasing concentrations of various formats of IL-2/anti-HER2 immunocytokines (0, 0.32, 1.6, 8, 40, 200, or 1000 ng/mL). Free state rIL-2 served as positive control (0.2 or 1 ng/mL). Percent T-cell proliferation of IL-2/anti-HER2 immunocytokine relative to rIL-2 was calculated by normalizing to corresponding molecular weights. The molecular weights of IL-2/anti-HER2 immunocytokine and rIL-2 are about 162 kDa and 12 kDa, respectively, hence about 13 ng of IL-2/anti-HER2 immunocytokine is equivalent to about 1 ng of rIL-2 for the same IL-2 molar concentration.

[0484] As can be seen from Table 1, when the IL-2 variant was fused to the N-terminus of a subunit of the Fc fragment of the anti-HER2 antibody (IL-2 mutant-Fc-Her2 Ab), such IL-2 variant retained about 12.0% biological activity as measured by IL-2 signal transduction assay, and about 4.3% biological activity as measured by PBMC proliferation assay. When the IL-2 variant was fused to the C-terminus of a heavy chain of the anti-HER2 antibody (Fab-Fc-IL-2 mutant-Her2 Ab), such IL-2 variant retained about 6.3% biological activity as measured by IL-2 signal transduction assay, and about 3.1% biological activity as measured by PBMC proliferation assay.

[0485] When the IL-2 variant was positioned at the hinge region of a heavy chain of the anti-HER2 antibody (Fab-IL-2 mutant-Fc-Her2 Ab), such IL-2 variant only retained about 2.3% biological activity as measured by IL-2 signal transduction assay, and lost all biological activity as measured by PBMC proliferation assay. These results can be considered as reflecting IL-2 variant activity in the absence of binding of the anti-HER2 antigen-binding fragment to HER2, since HEK-IL-2 cells and PBMCs have minimal HER2 expression on the cell surface.

[0486] Hence, cytokine (e.g., IL-2 variant) positioned at the hinge region of a heavy chain of a full-length antibody (e.g., anti-HER2 antibody) in the absence of binding of the antibody to the target antigen (e.g., HER2) showed more restricted biological activity compared to when such cytokine was positioned at the N-terminus of a subunit of the Fc fragment, or at the C-terminus of a heavy chain of the full-length antibody, such as measured by signal transduction assay or PBMC proliferation assay.

TABLE 1
IL-2 biological activity of various
IL-2/anti-HER2 immunocytokine formats

| | Percent IL-2 | Percent T-cell |
|---|---|---|
| | signal transduction | proliferation |
| | (HEK-IL-2 | (PBMC proliferation |
| | reporter assay) | assay) |
| Recombinant human IL-2 | 100.0% | 100.0% |
| (free state) | | |
| Anti-HER2 antibody | 0.0% | 0.0% |
| (trastuzumab Herceptin ®) | | |
| IL-2 mutant-Fc-HER2 Ab | 12.0% | 4.3% |
| Fab-Fc-IL-2 mutant-HER2 | 6.3% | 3.1% |
| Ab | | |
| Fab-IL-2 mutant-Fc-HER2 | 2.3% | 0.0% |
| Ab | | |

### Example 2: Immunocytokine with Cytokine Positioned at the Hinge Region Demonstrates Target Antigen Binding-Dependent Cytokine Activity

[0487] An anti-CD3 antibody specifically recognizing CD3E (made in-house) comprising VH (SEQ ID NO: 91) and VL (SEQ ID NO: 92) sequences was used as the parental full-length antibody, comprising two light chains each comprising the amino acid sequence of SEQ ID NO: 94. This anti-CD3E antibody does not compete with OKT3 antibody for binding to CD3, and is unable to activate TCR signaling (i.e., non-active anti-CD3 antibody), thus cannot stimulate PBMC or T cell proliferation. To construct heterodimer, one heavy chain comprises a hinge region comprising SEQ ID NO: 42, and an Fc domain subunit comprising SEQ ID NO: 61; the other heavy chain comprises a hinge region comprising SEQ ID NO: 41, and an Fc domain subunit comprising SEQ ID NO: 62. The IL-2 variant comprising R38D/K43E/E61R triple mutations (SEQ ID NO: 2) was positioned at below positions for constructing various IL-2/anti-CD3 immunocytokines: i) an IL-2 variant was fused to the N-terminus of a subunit of the Fc fragment (see FIG. 1B for exemplary structure), hereinafter referred to as “IL-2 mutant-Fc-CD3 Ab”; ii) an IL-2 variant was fused to the C-terminus of a heavy chain of the anti-CD3 antibody (see FIG. 1C for exemplary structure), hereinafter referred to as “Fab-Fc-IL-2 mutant-CD3 Ab”; and iii) an IL-2 variant was positioned within the hinge region of a heavy chain of the anti-CD3 antibody (see FIG. 2A for exemplary structure), hereinafter referred to as “Fab-IL-2 mutant-Fc-CD3 Ab.” The Fab-IL-2 mutant-Fc-CD3 Ab immunocytokine comprises two light chains each comprising the amino acid sequence of SEQ ID NO: 94, one heavy chain comprising the amino acid sequence of SEQ ID NO: 95, and one heavy chain with the IL-2 variant positioned at the hinge region comprising the amino acid sequence of SEQ ID NO: 96. IL-2/anti-CD3 immunocytokines were constructed, expressed, and purified as described in Example 1. The binding activity of different formats of IL-2/anti-CD3 immunocytokines to CD3+ T cells was verified using FACS.

[0488] IL-2 signal transduction assay using HEK-Blue™ IL-2 cells, and PBMC proliferation assay were similarly conducted as described in Example 1, with various formats of IL-2/anti-CD3 immunocytokines, rIL-2 (positive control), or anti-CD3 antibody (made in-house; negative control).

TABLE 2
IL-2 biological activity of various
IL-2/anti-CD3 immunocytokine formats

| | Percent IL-2 | Percent T-cell |
|---|---|---|
| | signal transduction | proliferation |
| | (HEK-IL-2 | (PBMC proliferation |
| | reporter assay) | assay) |
| Recombinant human IL-2 | 100.0% | 100.0% |
| (free state) | | |
| Anti-CD3 antibody (in- | 0.0% | 0.0% |
| house) | | |
| IL-2 mutant-Fc-CD3 Ab | 11.0% | 39.0% |
| Fab-Fc-IL-2 mutant-CD3 Ab | 6.7% | 52.0% |
| Fab-IL-2 mutant-Fc-CD3 Ab | 2.5% | 45.0% |

[0489] Since HEK-IL-2 cells have no CD3 expression on the cell surface, IL-2 signal transduction assay with HEK-IL-2 reporter cells reflects IL-2 variant activity in the absence of binding of the anti-CD3 antigen-binding fragment to CD3. As can be seen from Table 2, when the IL-2 variant was fused to the N-terminus of a subunit of the Fc fragment of the anti-CD3 antibody (IL-2 mutant-Fc-CD3 Ab), such IL-2 variant retained about 11.0% biological activity; when the IL-2 variant was fused to the C-terminus of a heavy chain of the anti-CD3 antibody (Fab-Fc-IL-2 mutant-CD3 Ab), such IL-2 variant retained about 6.7% biological activity; when the IL-2 variant was positioned at the hinge region of a heavy chain of the anti-CD3 antibody (Fab-IL-2 mutant-Fc-CD3 Ab), such IL-2 variant only retained about 2.5% biological activity. This result is consistent with that shown in Table 1 for IL-2/anti-HER2 immunocytokines as measured by IL-2 signal transduction assay.

[0490] In the presence of binding of the anti-CD3 antigen-binding fragment to CD3 in PBMC (CD3+ T cells), IL-2/anti-CD3 immunocytokines all demonstrated much higher IL-2 biological activity compared to that without CD3 binding. As shown in PBMC proliferation assay in Table 2, when the IL-2 variant was fused to the N-terminus of a subunit of the Fc fragment of the anti-CD3 antibody (IL-2 mutant-Fc-CD3 Ab), the biological activity of the IL-2 variant increased to about 39.0% upon anti-CD3 antibody/CD3 binding; when the IL-2 variant was fused to the C-terminus of a heavy chain of the anti-CD3 antibody (Fab-Fc-IL-2 mutant-CD3 Ab), the biological activity of the IL-2 variant increased to about 52.0% upon anti-CD3 antibody/CD3 binding. Such increase in cytokine biological activity was likely because antigen-antibody binding brought the cytokine moiety close to its receptor and increased the likelihood of cytokine-receptor binding, and/or due to the stabilization effect from antibody-antigen binding. Surprisingly, IL-2 variant positioned at the hinge region of a heavy chain of the anti-CD3 antibody revealed IL-2 biological activity upon anti-CD3 antibody/CD3 binding, increased to about 45.0%, which was even stronger than that of cytokine N-terminus fusion (IL-2 mutant-Fc-CD3 Ab).

[0491] In view of results from Tables 1 and 2, the biological activity of cytokine (e.g., IL-2 variant) positioned at the hinge region of a heavy chain of the full-length antibody is target antigen (e.g., CD3) binding-dependent. IL-2/anti-HER2 immunocytokines, regardless of format, were unable to bind to T cells or HEK-IL-2 cells. Especially for immunocytokine with cytokine positioned at the hinge region of a heavy chain of the full-length antibody, without target antigen-binding by the antibody portion, the biological activity of such cytokine cannot be revealed. See 0.0% PBMC proliferation in Table 1 for Fab-IL-2 mutant-Fc-Her2 Ab. On the contrary, IL-2/anti-CD3 immunocytokines, which are able to bind to T cells via CD3, revealed the biological activity of cytokine positioned at the hinge region of a heavy chain of the full-length antibody. See 45.0% PBMC proliferation in Table 2 for Fab-IL-2 mutant-Fc-CD3 Ab. These results suggest that immunocytokine comprising cytokine positioned at the hinge region of a heavy chain of a full-length antibody may provide target specificity and reduce cytokine storm.

### Example 3: Immunocytokines with Cytokine Positioned at the Hinge Region Favor Target Antigen-Antibody (or Ligand-Receptor) Binding First, then Cytokine-Cytokine Receptor Binding Second

[0492] An anti-human PD-1 antibody comprising nivolumab (Opdivo®) VH (SEQ ID NO: 102) and VL (SEQ ID NO: 103) sequences was used as the parental full-length antibody, comprising two light chains each comprising the amino acid sequence of SEQ ID NO: 106. To construct heterodimer, one heavy chain comprises a hinge region comprising SEQ ID NO: 42, and an Fc domain subunit comprising SEQ ID NO: 61; the other heavy chain comprises a hinge region comprising SEQ ID NO: 41, and an Fc domain subunit comprising SEQ ID NO: 62. The IL-2 variant comprising R38D/K43E/E61R triple mutations (SEQ ID NO: 2) was positioned within the hinge region of a heavy chain of the anti-PD-1 antibody (see FIG. 2A for exemplary structure), to construct the IL-2/anti-PD-1 immunocytokine “Fab-IL-2 mutant-Fc-PD-1 Ab.” The Fab-IL-2 mutant-Fc-PD-1 Ab immunocytokine (or “IL-2(R38D/K43E/E61R)/anti-PD-1 immunocytokine”) comprises two light chains each comprising the amino acid sequence of SEQ ID NO: 106, one heavy chain comprising the amino acid sequence of SEQ ID NO: 107, and one heavy chain with the IL-2 variant positioned at the hinge region comprising the amino acid sequence of SEQ ID NO: 108.

[0493] A PD-L2-Fc fusion protein (PD-L2 extracellular domain fused to the N-terminus of an Fc fragment through an N′ truncated IgG1 hinge (SEQ ID NO: 50); SEQ ID NO: 177) was used as another parental construct to construct immunocytokines that bind to PD-1. To construct heterodimeric PD-L2-Fc fusion protein, one PD-L2-Fc fusion polypeptide comprises a hinge region comprising SEQ ID NO: 52, and an Fc domain subunit comprising SEQ ID NO: 61; the other PD-L2-Fc fusion polypeptide comprises a hinge region comprising SEQ ID NO: 51, and an Fc domain subunit comprising SEQ ID NO: 62. The IL-2/PD-L2-Fc immunocytokine “ligand-IL-2 mutant-PD-L2-Fc” or “IL-2(R38D/K43E/E61R)/PD-L2-Fc immunocytokine” (or “construct #11”) comprises one fusion polypeptide (SEQ ID NO: 180) from N′ to C′: PD-L2 extracellular domain—GGGGS linker (SEQ ID NO: 213)—IL-2 variant (SEQ ID NO: 2)—N′ truncated IgG1 hinge (SEQ ID NO: 52)—an Fc fragment, and one pairing polypeptide (SEQ ID NO: 179) comprising from N′ to C′: PD-L2 extracellular domain—GGGGS linker (SEQ ID NO: 213)—IL-2 variant (SEQ ID NO: 2)—N′ truncated IgG1 hinge (SEQ ID NO: 51)—a pairing Fc fragment.

[0494] Fab-IL-2 mutant-Fc-PD-1 Ab and ligand-IL-2 mutant-PD-L2-Fc were constructed, expressed, and purified as described in Example 1. FACS was used to confirm that both Fab-IL-2 mutant-Fc-PD-1 Ab and ligand-IL-2 mutant-PD-L2-Fc bind to HEK-PD-I-IL-2 cells (generated in-house by overexpressing human PD-1 in HEK-Blue™ IL-2 Cells using a lentiviral vector), but not to HEK-Blue™ IL-2 Cells (InvivoGen Cat. #hkb-i12).

[0495] HEK-Blue™ IL-2 Cells and HEK-PD-1-IL-2 cells were used to assess IL-2 signal activation activity of Fab-IL-2 mutant-Fc-PD-1 Ab and ligand-IL-2 mutant-PD-L2-Fc, as described in Example 1. Recombinant human IL-2 (rIL-2) served as positive control. Anti-PD-1 antibody nivolumab (Opdivo®) and parental PD-L2-Fc fusion protein (each polypeptide chain comprises SEQ ID NO: 177) served as negative controls.

TABLE 3
IL-2 biological activity of Fab-IL-2 mutant-
Fc-PD-1 Ab and ligand-IL-2 mutant-PD-L2-Fc

| | Percent IL-2 | Percent IL-2 signal |
|---|---|---|
| | signal transduction | transduction |
| | (HEK-IL-2 | (HEK-PD-1-IL-2 |
| | reporter assay) | reporter assay) |
| Recombinant human IL-2 | 100.0% | 100.0% |
| (free state) | | |
| Anti-PD-1 antibody | 0.0% | 0.0% |
| (nivolumab (Opdivo ®)) | | |
| Parental PD-L2-Fc fusion | 0.0% | 0.0% |
| protein | | |
| Fab-IL-2 mutant-Fc-PD-1 Ab | 2.1% | 35.2% |
| ligand-IL-2 mutant-PD-L2-Fc | 2.4% | 43.5% |

[0496] Consistent with data shown in Examples 1 and 2, in the absence of target antigen (PD-1) binding, IL-2 positioned at the hinge region of the immunocytokine showed little biological activity (2.1% or 2.4%) compared to free state rIL-2 (100.0%), as measured by HEK-IL-2 reporter assay. Comparing HEK-IL-2 reporter assay and HEK-PD-I-IL-2 reporter assay results in Table 3, binding of anti-PD-1 antigen-binding fragment or PD-L2 extracellular domain to PD-1 on cell surface greatly facilitated the engagement of IL-2 variant with IL-2 receptor. In other words, immunocytokines with cytokine positioned at the hinge region favored target antigen-antibody binding (Fab-IL-2 mutant-Fc-PD-1 Ab, 35.2% vs. 2.1%) or ligand-receptor binding (ligand-IL-2 mutant-PD-L2-Fc, 43.5% vs. 2.4%) first, then cytokine-cytokine receptor binding second.

### Example 4: Generation of IL-12 Variants with Reduced Biological Activity in the Absence of Target Antigen-Binding of Immunocytokines

### Construction of IL-12 Variants and Immunocytokines Thereof

[0497] IL-12 is a heterodimeric cytokine composed of covalently linked p35 and p40 subunits. IL-12 variants comprising amino acid substitution in the p40 subunit were constructed by replacing amino acids from position 56 to 65 of the p40 subunit with Alanine or Serine (see Table 4), and a single chain IL-12 variant was made, from N′ to C′: p40 variant subunit—linker (SEQ ID NO: 228)—p35 wildtype subunit (SEQ ID NO: 29). A single chain “wildtype” IL-12 was also constructed as a control (SEQ ID NO: 35), from N′ to C′: p40 wildtype subunit-linker (SEQ ID NO: 228)—p35 wildtype subunit, referred to as “WT” in Table 4.

[0498] An anti-human PD-1 antibody comprising nivolumab (Opdivo®) VH (SEQ ID NO: 102) and VL (SEQ ID NO: 103) sequences was used as the parental full-length antibody, comprising two light chains each comprising the amino acid sequence of SEQ ID NO: 106. To construct heterodimer, one heavy chain comprises a hinge region comprising SEQ ID NO: 42, and an Fc domain subunit comprising SEQ ID NO: 61; the other heavy chain comprises a hinge region comprising SEQ ID NO: 41, and an Fc domain subunit comprising SEQ ID NO: 62. Various single chain IL-12 variants (or single chain “wildtype” IL-12 control) were positioned within the hinge region of a heavy chain of the anti-PD-1 antibody (see FIG. 2B for exemplary structure), to construct IL-12/anti-PD-1 immunocytokines “Fab-IL-12-Fc-PD-1 Ab.” For example, Fab-IL-12(E59A/F60A)-Fc-PD-1 Ab immunocytokine (or “IL-12(E59A/F60A)/anti-PD-1 immunocytokine” or “construct #48”) comprising a single-chain IL-12 variant IL-12B (p40 E59A/F60A)-linker-IL-12A (wt p35) positioned at the hinge region comprises two light chains each comprising the amino acid sequence of SEQ ID NO: 106, one heavy chain comprising the amino acid sequence of SEQ ID NO: 107, and one heavy chain with the single-chain IL-12(E59A/F60A) variant (SEQ ID NO: 36) positioned at the hinge region comprising the amino acid sequence of SEQ ID NO: 112. IL-12(G64A)/anti-PD-1 immunocytokine (“construct #47”) comprising a single-chain IL-12 variant IL-12B (p40 G64A)-linker-IL-12A (wt p35) positioned at the hinge region comprises two light chains each comprising the amino acid sequence of SEQ ID NO: 106, one heavy chain comprising the amino acid sequence of SEQ ID NO: 107, and one heavy chain with the single-chain IL-12(G64A) variant (SEQ ID NO: 332) positioned at the hinge region. IL-12(E59A)/anti-PD-1 immunocytokine (“construct #46”) comprising a single-chain IL-12 variant IL-12B (p40 E59A)-linker-IL-12A (wt p35) positioned at the hinge region comprises two light chains each comprising the amino acid sequence of SEQ ID NO: 106, one heavy chain comprising the amino acid sequence of SEQ ID NO: 107, and one heavy chain with the single-chain IL-12(E59A) variant (SEQ ID NO: 331) positioned at the hinge region. Immunocytokines were constructed, expressed, and purified as described in Example 1.

### IL-12 Signal Transduction Assay

[0499] HEK-Blue™ IL-12 Cells (InvivoGen Cat. #hkb-i112) and HEK-PD-1-IL-12 cells (generated in-house by overexpressing human PD-1 in HEK-Blue™ IL-12 Cells using a lentiviral vector) were used to assess IL-12 signal activation activity of the various Fab-IL-12-Fc-PD-1 Ab immunocytokines comprising different IL-12 moieties, following the InvivoGen user manual (InvivoGen Cat. #hkb-il12), hereinafter also referred to as “HEK-IL-12 reporter assay” or “HEK-PD-1-IL-12 reporter assay.” HEK-Blue™ IL-12 reporter cells and HEK-PD-I-IL-12 reporter cells stably express the human IL-12 receptor complex consisting of the IL-12 receptor β1 (IL-12Rβ1) and IL-12Rβ2, along with the human STAT4 gene to obtain a fully functional IL-12 signaling pathway (TyK2/JAK2/STAT4). In addition, these reporter cells also carry a STAT4-inducible SEAP reporter gene. Upon IL-2 stimulation, HEK-Blue™ IL-12 reporter cells and HEK-PD-I-IL-12 reporter cells trigger the activation of STAT4 and the subsequent secretion of SEAP, the levels of which can be monitored using QUANTI-Blue™ (InvivoGen Cat. #rep-qbs) colorimetric enzyme assay for alkaline phosphatase activity. Experimental procedure was similar as described in Example 1 for IL-2 signal transduction assay. Recombinant human IL-12 (rIL-12) in free state served as positive control and reference for percent activity calculation.

TABLE 4
IL-12 biological activity of Fab-IL-12-Fc-PD-1
Abs comprising different IL-12 moieties

| | rIL-12 | “WT” | Q56A | V57A | K58A | E59A | F60A |
|---|---|---|---|---|---|---|---|
| HEK-IL-12 cells | 100.0% | 50.0% | 55.0% | 48.0% | 39.0% | 10.0% | 9.0% |
| HEK-PD-1-IL-12 cells | 100.0% | 120.0% | 150.0% | 91.0% | 98.0% | 45.0% | 56.0% |

| | G61A | D62A | A63S | G64A | Q65A | E59A/F60A |
|---|---|---|---|---|---|---|
| HEK-IL-12 cells | 56.0% | 57.0% | 62.0% | 69.0% | 62.0% | 0.1% |
| HEK-PD-1-IL-12 cells | 130.0% | 93.0% | 89.0% | 150.0% | 130.0% | 5.9% |

[0500] In HEK-IL-12 reporter assay, Fab-IL-12-Fc-PD-1 Abs were only able to bind to HEK-IL-12 cells via IL-12 moiety/IL-12 receptor interaction. Positioning IL-12 comprising wildtype p40 subunit at the hinge region of the anti-PD-1 antibody (“Fab-IL-12(WT)-Fc-PD-1 Ab”) reduced IL-12 activity to 50.0%, in the absence of PD-1 binding. As can be seen from Table 4, positions 59 and 60 of p40 subunit are crucial for IL-12 biological activity. Fab-IL-12-Fc-PD-1 Ab comprising E59A/F60A double mutations in the IL-12 p40 subunit (“Fab-IL-12(E59A/F60A)-Fc-PD-1 Ab”) showed almost completely aborted IL-12 activity as measured by IL-12 signal transduction (0.1%).

[0501] In HEK-PD-1-IL-12 reporter assay, Fab-IL-12-Fc-PD-1 Abs were able to bind to HEK-PD-1-IL-12 cells via both IL-12 moiety/IL-12 receptor interaction, and anti-PD-1 antigen-binding fragment/PD-1 interaction. As can be seen from Table 4, the biological activity of all IL-12 variants (and “WT” IL-12) in Fab-IL-12-Fc-PD-1 Ab increased with the presence of PD-1 binding. Especially, the IL-12 activity of Fab-IL-12(E59A/F60A)-Fc-PD-1 Ab was rescued by PD-1/anti-PD-1 antibody binding to 5.9%, which was 59-fold of that in the absence of PD-1/anti-PD-1 antibody binding (0.1%).

[0502] E59A/F60A double mutations in the IL-12 p40 subunit demonstrated superior effect compared to other mutations in IL-12 p40 subunit. By positioning this IL-12 E59A/F60A variant at the hinge region of a heavy chain of the anti-PD-1 full-length antibody, the obtained Fab-IL-12(E59A/F60A)-Fc-PD-1 Ab immunocytokine only exhibited IL-12 biological activity in the presence of target antigen (PD-1)-antibody binding, but not in the absence of target antigen (PD-1)-antibody binding, demonstrating targeted specificity.

### Example 5: Generation of IL-12/Anti-CD4 Immunocytokine (Fab-IL-12-Fc-CD4 Ab) with IL-12 Biological Activity Directed to CD4+ T Cells

### Construction of Fab-IL-12-Fc-CD4 Ab Immunocytokines

[0503] An anti-CD4 antibody comprising Ibalizumab (Trogarzo®) VH (SEQ ID NO: 73) and VL (SEQ ID NO: 74) sequences was used as the parental anti-CD4 full-length antibody, comprising two light chains each comprising the amino acid sequence of SEQ ID NO: 77. Ibalizumab is a non-immunosuppressive humanized monoclonal antibody that has been approved by FDA in HIV treatment. To construct heterodimer, one heavy chain comprises a hinge region comprising SEQ ID NO: 42, and an Fc domain subunit comprising SEQ ID NO: 61; the other heavy chain comprises a hinge region comprising SEQ ID NO: 41, and an Fc domain subunit comprising SEQ ID NO: 62. Single chain “wildtype” IL-12, or IL-12 variant comprising E59A, F60A, or E59A/F60A double mutation in p40 subunit (SEQ ID NOs: 31-33) as described in Example 4, was positioned within the hinge region of a heavy chain of the anti-CD4 antibody (see FIG. 2B for exemplary structure), to construct IL-12/anti-CD4 immunocytokines “Fab-IL-12-Fc-CD4 Ab.” For example, Fab-IL-12(E59A/F60A)-Fc-CD4 Ab immunocytokine comprises two light chains each comprising the amino acid sequence of SEQ ID NO: 77, one heavy chain comprising the amino acid sequence of SEQ ID NO: 78, and one heavy chain with the single-chain IL-12 variant (SEQ ID NO: 36) positioned at the hinge region comprising the amino acid sequence of SEQ ID NO: 83. Immunocytokines were constructed, expressed, and purified as described in Example 1. FACS was used to confirm that Fab-IL-12-Fc-CD4 Abs were able to bind to CD4+ T cells, but not to CD8+ T cells (data not shown).

### Interferon-Gamma Release Assay (IGRA) for Measuring IL-12 or IL-23 Biological Activity

[0504] The biological activity of IL-12 or IL-23 can be measured by the amount of IFN-γ released from activated T cells. Binding of IL-12 to its receptor (heterodimeric receptor composed of IL-12R-β1 and IL-12R-β2 subunits) triggers a signaling pathway involving TyK2 (tyrosine kinase 2), JAK2 (Janus kinase 2) and STAT4 (signal transducer and activator of transcription 4) which results in the production of IFN-γ. CD4+ T cells or CD8+ T cells were isolated from PBMC, and stimulated by anti-CD3 antibody (1 μg/mL OKT3) in the presence of recombinant human IL-2 (30 units/mL) for 5 days. After 5 days, the activated CD4+ or CD8+ T cells (80,000 cells/well) were cultured in the presence of increasing concentrations of recombinant human IL-12 (rIL-12) or recombinant human IL-23 (rIL-23) (0, 0.62, 1.25, 2.5, 5, 10, or 20 ng/mL). The following day, the amount of IFN-γ released into the cell culture medium was measured by an ELISA assay. Percent IL-12 or IL-23 biological activity was calculated by dividing the readout of IL-12-immunocytokine or IL-23-immunocytokine by the readout of rIL-12 or rIL-23.

[0505] The minimal concentration of rIL-12 required to stimulate the release of IFN-γ from activated T cells was 2.5 ng/ml, while for rIL-23 it was 5 ng/ml. To determine the minimal concentration of the IL-12-immunocytokine or the IL-23-immunocytokine to observe a positive biological response, activated CD4+ or CD8+ T cells (80,000 cells/well) were cultured overnight in the presence of increasing concentrations of IL-12-immunocytokines or IL-23-immunocytokines (0, 0.32, 1.6, 8, 40, 200, or 1000 ng/mL). rIL-12 (2.5 ng/mL) or rIL-23 (5 ng/mL) served as positive control. The percent biological activity of the IL-12-immunocytokine or the IL-23-immunocytokine relative to corresponding free state cytokine (rIL-12 or rIL-23) was calculated by normalizing to corresponding molecular weights. The molecular weights of IL-12-immunocytokine and rIL-12 are about 220 kDa and about 70 kDa, respectively. The molecular weights of IL-23-immunocytokine and rIL-23 are about 215 kDa and about 65 kDa, respectively. Hence, about 3 ng of IL-12-immunocytokine or IL-23-immunocytokine is equivalent to about 1 ng of rIL-12 or rIL-23 for the same IL-12 or IL-23 molar concentration.

TABLE 5
IL-12 biological activity of Fab-IL-12-Fc-
CD4 Abs comprising different IL-12 moieties

| | rIL-12 | “WT” | E59A | F60A | E59A/F60A |
|---|---|---|---|---|---|
| CD4+ T cells | 100.0% | 43.0% | 29.8% | 32.2% | 8.2% |
| CD8+ T cells | 100.0% | 25.0% | 1.1% | 1.5% | 0.0% |

[0506] As can be seen from Table 5, positioning IL-12 comprising a wildtype p40 subunit at the hinge region still retained IL-12 activity of about 25.0%, even in the absence of target antigen (CD4)-antibody binding in CD8+ T cells. E59A and F60A mutations in p40 subunit significantly reduced IL-12 activity to about 1.1% or 1.5% in the absence of CD4/anti-CD4 antibody binding, which was rescued to about 29.8% or 32.2% in the presence of CD4+ T cells/anti-CD4 antibody binding. Fab-IL-12-Fc-CD4 Ab comprising E59A/F60A double mutations in IL-12 p40 subunit (“Fab-IL-12(E59A/F60A)-Fc-CD4 Ab”) demonstrated CD4+ T cells specific IL-12 biological activity (8.2%), with no cross reactivity with CD8+ T cells (0.0%). These data demonstrate successful generation of anti-CD4 antibody-based immunocytokines that can specifically target cytokine (e.g., IL-12) biological activity towards CD4+ T cells.

### Example 6: Generation of IL-12/Anti-CD8 Immunocytokine (Fab-IL-12-Fc-CD8 Ab) with IL-12 Biological Activity Directed to CD8+ T Cells

[0507] An anti-CD8 antibody comprising clone G10⁻¹ VH (SEQ ID NO: 114) and VL (SEQ ID NO: 115) sequences was used as the parental anti-CD8 full-length antibody, comprising two light chains each comprising the amino acid sequence of SEQ ID NO: 117. To construct heterodimer, one heavy chain comprises a hinge region comprising SEQ ID NO: 42, and an Fc domain subunit comprising SEQ ID NO: 61; the other heavy chain comprises a hinge region comprising SEQ ID NO: 41, and an Fc domain subunit comprising SEQ ID NO: 62. Single chain “wildtype” IL-12, or IL-12 variant comprising E59A, F60A, or E59A/F60A double mutation in p40 subunit (SEQ ID NOs: 31-33) as described in Example 4, was positioned within the hinge region of a heavy chain of the anti-CD8 antibody (see FIG. 2B for exemplary structure), to construct IL-12/anti-CD8 immunocytokines “Fab-IL-12-Fc-CD8 Ab.” For example, Fab-IL-12(E59A/F60A)-Fc-CD8 Ab immunocytokine comprises two light chains each comprising the amino acid sequence of SEQ ID NO: 117, one heavy chain comprising the amino acid sequence of SEQ ID NO: 118, and one heavy chain with the single-chain IL-12 variant (SEQ ID NO: 36) positioned at the hinge region comprising the amino acid sequence of SEQ ID NO: 123. Immunocytokines were constructed, expressed, and purified as described in Example 1. FACS was used to confirm that Fab-IL-12-Fc-CD8 Abs were able to bind to CD8+ T cells, but not to CD4+ T cells (data not shown).

[0508] IFN-γ release assay was conducted similarly as described in Example 5, by culturing activated CD4+ or CD8+ T cells in the presence of increasing concentrations of rIL-12 (positive control) or Fab-IL-12-Fc-CD8 Abs. The following day, the amount of IFN-γ released into the cell culture medium was measured by an ELISA assay. Percent IL-12 biological activity was calculated by dividing the readout of Fab-IL-12-Fc-CD8 Ab by the readout of rIL-12.

TABLE 6
IL-12 biological activity of Fab-IL-12-Fc-
CD8 Abs comprising different IL-12 moieties

| | rIL-12 | “WT” | E59A | F60A | E59A/F60A |
|---|---|---|---|---|---|
| CD4+ T cells | 100.0% | 21.0% | 2.1% | 1.2% | 0.0% |
| CD8+ T cells | 100.0% | 56.0% | 24.2% | 21.9% | 11.0% |

[0509] As can be seen from Table 6, positioning IL-12 comprising a wildtype p40 subunit at the hinge region still retained IL-12 activity of about 21.0%, even in the absence of target antigen (CD8)-antibody binding in CD4+ T cells. E59A and F60A mutations in p40 subunit significantly reduced IL-12 activity to about 2.1% or 1.2% in the absence of CD8/anti-CD8 antibody binding, which was rescued to about 24.2% or 21.9% in the presence of CD8+ T cells/anti-CD8 antibody binding. Fab-IL-12-Fc-CD8 Ab comprising E59A/F60A double mutations in IL-12 p40 subunit (“Fab-IL-12(E59A/F60A)-Fc-CD8 Ab”) demonstrated CD8+ T cells specific IL-12 biological activity (11.0%), with no cross reactivity with CD4+ T cells (0.0%). These data demonstrate successful generation of anti-CD8 antibody-based immunocytokines that can specifically target cytokine (e.g., IL-12) biological activity towards CD8+ T cells.

### Example 7: Generation of IL-23/Anti-PD-1 Immunocytokine (Fab-IL-23-Fc-PD-1 Ab) with IL-23 Biological Activity Directed to PD-1-Positive Cells

### Construction of IL-23 Variants and Immunocytokines Thereof

[0510] IL-23 is a heterodimeric cytokine composed of p19 subunit and p40 subunit. The p40 subunit is shared with IL-12. IL-23 variants were constructed similarly as described in Example 4, by generating amino acid substitutions in the shared p40 subunit (see Table 7). A single chain IL-23 variant was made, from N′ to C′: p40 variant subunit (SEQ ID NOs: 31-34)—linker (SEQ ID NO: 229)—p19 wildtype subunit (SEQ ID NO: 37). A single chain “wildtype” IL-23 was also constructed as a control (SEQ ID NO: 38), from N′ to C′: p40 wildtype subunit-linker (SEQ ID NO: 229)—p19 wildtype subunit, referred to as “WT” in Table 7.

[0511] An anti-human PD-1 antibody comprising nivolumab (Opdivo®) VH (SEQ ID NO: 102) and VL (SEQ ID NO: 103) sequences was used as the parental full-length antibody, comprising two light chains each comprising the amino acid sequence of SEQ ID NO: 106. To construct heterodimer, one heavy chain comprises a hinge region comprising SEQ ID NO: 42, and an Fc domain subunit comprising SEQ ID NO: 61; the other heavy chain comprises a hinge region comprising SEQ ID NO: 41, and an Fc domain subunit comprising SEQ ID NO: 62. Various single chain IL-23 variants (or single chain “wildtype” IL-23 control) were positioned within the hinge region of a heavy chain of the anti-PD-1 antibody (see FIG. 2B for exemplary structure), to construct IL-23/anti-PD-1 immunocytokines “Fab-IL-23-Fc-PD-1 Ab.” For example, Fab-IL-23(E59A/F60A)-Fc-PD-1 Ab immunocytokine comprising a single-chain IL-23 variant IL-12B (p40 E59A/F60A)-linker-IL-23A (wt p19) positioned at the hinge region comprises two light chains each comprising the amino acid sequence of SEQ ID NO: 106, one heavy chain comprising the amino acid sequence of SEQ ID NO: 107, and one heavy chain with the single-chain IL-23 variant (SEQ ID NO: 39) positioned at the hinge region comprising the amino acid sequence of SEQ ID NO: 113. Immunocytokines were constructed, expressed, and purified as described in Example 1.

### IL-23 Signal Transduction Assay

[0512] HEK-Blue™ IL-23 Cells (InvivoGen Cat. #hkb-i123) and HEK-PD-1-IL-23 cells (generated in-house by overexpressing human PD-1 in HEK-Blue™ IL-23 Cells using a lentiviral vector) were used to assess IL-23 signal activation activity of the various Fab-IL-23-Fc-PD-1 Ab immunocytokines comprising different IL-23 moieties, following the InvivoGen user manual (InvivoGen Cat. #hkb-i123), hereinafter also referred to as “HEK-IL-23 reporter assay” or “HEK-PD-1-IL-23 reporter assay.” HEK-Blue™ IL-23 reporter cells and HEK-PD-1-IL-23 reporter cells stably express the receptor complex consisting of IL-12R1 and the IL-23 receptor (IL-23R), along with the human STAT3 gene to obtain a fully functional IL-23 signaling pathway (TyK2/JAK2/STAT3). In addition, these reporter cells also carry a STAT3-inducible SEAP reporter gene. Upon IL-2 stimulation, HEK-Blue™ IL-23 reporter cells and HEK-PD-1-IL-23 reporter cells trigger the activation of STAT3 and the subsequent secretion of SEAP, the levels of which can be monitored using QUANTI-Blue™ (InvivoGen Cat. #rep-qbs) colorimetric enzyme assay for alkaline phosphatase activity. Experimental procedure was similar as described in Example 1 for IL-2 signal transduction assay. Recombinant human IL-23 (rIL-23) in free state served as positive control and reference for percent activity calculation.

TABLE 7
IL-23 biological activity of Fab-IL-23-Fc-PD-1
Abs comprising different IL-23 moieties

| | rIL-23 | “WT” | G64A | E59A | F60A | E59A/F60A |
|---|---|---|---|---|---|---|
| HEK-IL-23 cells | 100.0% | 70.0% | 56.0% | 6.9% | 8.2% | 0.0% |
| HEK-PD-1-IL-23 cells | 100.0% | 150.0% | 180.0% | 39.0% | 46.0% | 4.8% |

[0513] As can be seen from Table 7, positioning IL-23 comprising a wildtype p40 subunit at the hinge region retained IL-23 activity of about 70.0%, even in the absence of target antigen (PD-1)-antibody binding in HEK-IL-23 reporter cells. E59A and F60A mutations in p40 subunit significantly reduced IL-23 activity to about 6.9% or 8.2% in the absence of PD-1/anti-PD-1 antibody binding, which was rescued to about 39.0% or 46.0% in the presence of PD-1/anti-PD-1 antibody binding in HEK-PD-1-IL-23 cells. Fab-IL-23-Fc-PD-1 Ab comprising E59A/F60A double mutations in IL-23 p40 subunit (“Fab-IL-23(E59A/F60A)-Fc-PD-1 Ab”) demonstrated PD-1-positive cell specific IL-23 biological activity (4.8%), with no cross reactivity with PD-1-negative cells (0.0%). These data demonstrate successful generation of anti-PD-1 antibody-based immunocytokines that can specifically target cytokine (e.g., IL-23) biological activity towards PD-1+ cells.

### Example 8: Generation of IL-23/Anti-CD4 Immunocytokine (Fab-IL-23-Fc-CD4 Ab) with IL-23 Biological Activity Directed to CD4+ T Cells

[0514] An anti-CD4 antibody comprising Ibalizumab (Trogarzo®) VH (SEQ ID NO: 73) and VL (SEQ ID NO: 74) sequences was used as the parental anti-CD4 full-length antibody, comprising two light chains each comprising the amino acid sequence of SEQ ID NO: 77. To construct heterodimer, one heavy chain comprises a hinge region comprising SEQ ID NO: 42, and an Fc domain subunit comprising SEQ ID NO: 61; the other heavy chain comprises a hinge region comprising SEQ ID NO: 41, and an Fc domain subunit comprising SEQ ID NO: 62. Single chain “wildtype” IL-23, or IL-23 variant comprising E59A, F60A, or E59A/F60A double mutation in p40 subunit (SEQ ID NOs: 31-33) as described in Example 7, was positioned within the hinge region of a heavy chain of the anti-CD4 antibody (see FIG. 2B for exemplary structure), to construct IL-23/anti-CD4 immunocytokines “Fab-IL-23-Fc-CD4 Ab.” For example, Fab-IL-23(E59A/F60A)-Fc-CD4 Ab immunocytokine comprises two light chains each comprising the amino acid sequence of SEQ ID NO: 77, one heavy chain comprising the amino acid sequence of SEQ ID NO: 78, and one heavy chain with the single-chain IL-23 variant (SEQ ID NO: 39) positioned at the hinge region comprising the amino acid sequence of SEQ ID NO: 84. Immunocytokines were constructed, expressed, and purified as described in Example 1. FACS was used to confirm that Fab-IL-23-Fc-CD4 Abs were able to bind to CD4+ T cells, but not to CD8+ T cells (data not shown).

[0515] IL-23 can stimulate activated CD4+ or CD8+ T cells to release IFN-γ. The IL-23 biological activity of various Fab-IL-23-Fc-CD4 Abs was measured using the IFN-γ release assay as described in Example 5. rIL-23 served as positive control and percent activity reference.

TABLE 8
IL-23 biological activity of Fab-IL-23-Fc-
CD4 Abs comprising different IL-23 moieties

| | rIL-23 | “WT” | E59A | F60A | E59A/F60A |
|---|---|---|---|---|---|
| CD4+ T cells | 100.0% | 34.0% | 24.0% | 29.0% | 6.8% |
| CD8+ T cells | 100.0% | 21.0% | 2.0% | 1.5% | 0.0% |

[0516] As can be seen from Table 8, positioning IL-23 comprising a wildtype p40 subunit at the hinge region still retained IL-23 activity of about 21.0%, even in the absence of target antigen (CD4)-antibody binding in CD8+ T cells. E59A and F60A mutations in p40 subunit significantly reduced IL-23 activity to about 2.0% or 1.5% in the absence of CD4/anti-CD4 antibody binding, which was rescued to about 24.0% or 29.0% in the presence of CD4+ T cells/anti-CD4 antibody binding. Fab-IL-23-Fc-CD4 Ab comprising E59A/F60A double mutations in IL-23 p40 subunit (“Fab-IL-23(E59A/F60A)-Fc-CD4 Ab”) demonstrated CD4+ T cells specific IL-23 biological activity (6.8%), with no cross reactivity with CD8+ T cells (0.0%). These data demonstrate successful generation of anti-CD4 antibody-based immunocytokines that can specifically target cytokine (e.g., IL-23) biological activity towards CD4+ T cells.

### Example 9: Generation of IL-10/Anti-PD-1 Immunocytokine (Fab-IL-10-Fc-PD-1 Ab) with IL-10 Biological Activity Directed to PD-1-Positive Cells

### Construction of IL-10 Variants and Immunocytokines Thereof

[0517] IL-10 is naturally expressed as a non-covalently linked homodimer. IL-10 variants were constructed by replacing amino acids from position 24 to 32 with Alanine or Serine (see Table 9), and a single chain IL-10 variant was made, from N′ to C′: IL-10 variant subunit (SEQ ID NOs: 21-26)-linker (SEQ ID NO: 227)—IL-10 variant subunit. A single chain “wildtype” IL-10 was also constructed as a control (SEQ ID NO: 27), from N′ to C′: IL-10 wildtype subunit (SEQ ID NO: 20) —linker (SEQ ID NO: 227)—IL-10 wildtype subunit, referred to as “WT” in Table 9.

[0518] An anti-human PD-1 antibody comprising nivolumab (Opdivo®) VH (SEQ ID NO: 102) and VL (SEQ ID NO: 103) sequences was used as the parental full-length antibody, comprising two light chains each comprising the amino acid sequence of SEQ ID NO: 106. To construct heterodimer, one heavy chain comprises a hinge region comprising SEQ ID NO: 42, and an Fc domain subunit comprising SEQ ID NO: 61; the other heavy chain comprises a hinge region comprising SEQ ID NO: 41, and an Fc domain subunit comprising SEQ ID NO: 62. Various single chain IL-10 variants (or single chain “wildtype” IL-10 control) were positioned within the hinge region of a heavy chain of the anti-PD-1 antibody (see FIG. 2A for exemplary structure), to construct IL-10/anti-PD-1 immunocytokines “Fab-IL-10-Fc-PD-1 Ab.” For example, Fab-IL-I0(R27A)-Fc-PD-1 Ab immunocytokine comprising a single-chain IL-10 variant IL-I0(R27A)-linker-IL-I0(R27A) positioned at the hinge region comprises two light chains each comprising the amino acid sequence of SEQ ID NO: 106, one heavy chain comprising the amino acid sequence of SEQ ID NO: 107, and one heavy chain with the single-chain IL-10 variant (SEQ ID NO: 28) positioned at the hinge region comprising the amino acid sequence of SEQ ID NO: 111. Immunocytokines were constructed, expressed, and purified as described in Example 1.

### IL-10 Signal Transduction Assay

[0519] HEK-Blue™ IL-10 Cells (InvivoGen Cat. #hkb-il10) and HEK-PD-1-IL-10 cells (generated in-house by overexpressing human PD-1 in HEK-Blue™ IL-10 Cells using a lentiviral vector) were used to assess IL-10 signal activation activity of the various Fab-IL-10-Fc-PD-1 Abs comprising different IL-10 moieties, following the InvivoGen user manual (InvivoGen Cat. #hkb-il10), hereinafter also referred to as “HEK-IL-10 reporter assay” or “HEK-PD-I-IL-10 reporter assay.” HEK-Blue™ IL-10 reporter cells and HEK-PD-I-IL-10 reporter cells stably express IL-10 receptor hIL-10Ra and hIL-10RD chains, human STAT3, and STAT3-inducible SEAP. Binding of IL-10 to its receptor on the surface of HEK-Blue™ IL-10 cells or HEK-PD-I-IL-23 reporter cells triggers JAK1/STAT3 signaling and the subsequent production of SEAP, the level of which in the cell culture supernatant can be monitored using QUANTI-Blue™ (InvivoGen Cat. #rep-qbs). Experimental procedure was similar as described in Example 1 for IL-2 signal transduction assay. Recombinant human IL-10 (rIL-10) in free state served as positive control and reference for percent activity calculation.

TABLE 9
IL-10 biological activity of Fab-IL-10-Fc-PD-1
Abs comprising different IL-10 moieties

| | rIL-10 | “WT” | R24A | D25A/L26A |
|---|---|---|---|---|
| HEK-IL-10 cells | 100.0% | 26.0% | 15.0% | 4.0% |
| HEK-PD-1-IL-10 cells | 100.0% | 200.0% | 150.0% | 56.0% |
| | R27A | D28A/A29S | F30A/S31A | R32A |
| HEK-IL-10 cells | <0.1% | 17.0% | 13.0% | 10.0% |
| HEK-PD-1-IL-10 cells | 21.0% | 70.0% | 67.0% | 42.0% |

[0520] As can be seen from Table 9, positioning IL-10 comprising wildtype IL-10 subunit at the hinge region still retained IL-10 activity of about 26.0%, even in the absence of target antigen (PD-1)-antibody binding in HEK-IL-10 cells. All IL-10 variants tested reduced IL-10 activity in the absence of PD-1/anti-PD-1 antibody binding compared to that of “wildtype” IL-10, and their IL-10 activity was rescued in the presence of PD-1/anti-PD-1 antibody binding in HEK-PD-I-IL-10 cells. Fab-IL-10-Fc-PD-1 Ab comprising R27A mutation in IL-10 (“Fab-IL-10(R27A)-Fc-PD-1 Ab”) demonstrated PD-1-positive cell specific IL-10 biological activity (21.0%), with minimal cross reactivity with PD-1-negative cells (≤0.1%). These data demonstrate successful generation of anti-PD-1 antibody-based immunocytokines that can specifically target cytokine (e.g., IL-10) biological activity towards PD-1-positive cells.

### Example 10: Generation of IFN-γ/Anti-PD-1 Immunocytokine (Fab-IFN-γ-Fc-PD-1 Ab) with IFN-γ Biological Activity Directed to PD-1-Positive Cells

### Construction of IFN-γ Variants and Immunocytokines Thereof

[0521] IFN-γ is naturally expressed as a symmetric homodimer. IFN-γ variants were constructed by replacing amino acids from position 20 to 25 with A, K, S, E, Q, or V (see Table 10), and a single chain IFN-γ variant was made, from N′ to C′: IFN-γ variant subunit (SEQ ID NOs: 11-17)—linker (SEQ ID NO: 227)—IFN-γ variant subunit. A single chain “wildtype” IFN-γ was also constructed as a control (SEQ ID NO: 18), from N′ to C′: IFN-γ wildtype subunit (SEQ ID NO: 10)-linker (SEQ ID NO: 227)—IFN-γ wildtype subunit, referred to as “WT” in Table 10.

[0522] An anti-human PD-1 antibody comprising nivolumab (Opdivo®) VH (SEQ ID NO: 102) and VL (SEQ ID NO: 103) sequences was used as the parental full-length antibody, comprising two light chains each comprising the amino acid sequence of SEQ ID NO: 106. To construct heterodimer, one heavy chain comprises a hinge region comprising SEQ ID NO: 42, and an Fc domain subunit comprising SEQ ID NO: 61; the other heavy chain comprises a hinge region comprising SEQ ID NO: 41, and an Fc domain subunit comprising SEQ ID NO: 62. Various single chain IFN-γ variants (or single chain “wildtype” IFN-γ control) were positioned within the hinge region of a heavy chain of the anti-PD-1 antibody (see FIG. 2A for exemplary structure), to construct IFN-γ/anti-PD-1 immunocytokines “Fab-IFN-γ-Fc-PD-1 Ab.” For example, Fab-IFN-γ(A23V)-Fc-PD-1 Ab immunocytokine comprising a single-chain IFN-γ variant IFN-γ(A23V)-linker-IFN-γ(A23V) positioned at the hinge region comprises two light chains each comprising the amino acid sequence of SEQ ID NO: 106, one heavy chain comprising the amino acid sequence of SEQ ID NO: 107, and one heavy chain with the single-chain IFN-γ variant (SEQ ID NO: 19) positioned at the hinge region comprising the amino acid sequence of SEQ ID NO: 110. Immunocytokines were constructed, expressed, and purified as described in Example 1.

### IFN-γ Signal Transduction Assay

[0523] HEK-Blue™ IFN-γ Cells (InvivoGen Cat. #hkb-ifng) and HEK-PD-1-IFN-γ cells (generated in-house by overexpressing human PD-1 in HEK-Blue™ IFN-γ Cells using a lentiviral vector) were used to assess IFN-γ signal activation activity of the various Fab-IFN-γ-Fc-PD-1 Abs comprising different IFN-γ moieties, following the InvivoGen user manual (InvivoGen Cat. #hkb-ifng), hereinafter also referred to as “HEK-IFN-γ reporter assay” or “HEK-PD-1-IFN-γ reporter assay.” HEK-Blue™ IFN-γ reporter cells and HEK-PD-1-IFN-γ reporter cells stably express human STAT1 gene, and STAT1-inducible SEAP. The other genes of the pathway are naturally expressed in sufficient amounts in the reporter cells. Binding of IFN-γ to its heterodimeric receptor consisting of IFNGR1 and IFNGR2 chains on the surface of HEK-Blue™ IFN-γ cells or HEK-PD-1-IFN-γ reporter cells triggers JAK1/JAK2/STAT1 signaling and the subsequent production of SEAP, the level of which in the cell culture supernatant can be monitored using QUANTI-Blue™ (InvivoGen Cat. #rep-qbs). Experimental procedure was similar as described in Example 1 for IL-2 signal transduction assay. Recombinant human IFN-γ (rIFN-γ) in free state served as positive control and reference for percent activity calculation.

TABLE 10
IFN-γ biological activity of Fab-IFN-γ-Fc-PD-1
Abs comprising different IFN-γ moieties

| | rIFN-γ | “WT” | S20A/D21A | D21K | V22A/A23S |
|---|---|---|---|---|---|
| HEK-IFN-γ cells | 100.0% | 36.0% | 30.0% | 35.0% | 1.2% |
| HEK-PD-1-IFN-γ cells | 100.0% | 130.0% | 89.0% | 110.0% | 24.0% |

| | D24A/N25A | A23E/D24E/N25K | A23Q | A23V |
|---|---|---|---|---|
| HEK-IFN-γ cells | 21.0% | 0.2% | 0.8% | 0.6% |
| HEK-PD-1-IFN-γ cells | 70.0% | 23.0% | 31.0% | 27.0% |

[0524] As can be seen from Table 10, positioning IFN-γ comprising wildtype IFN-γ subunit at the hinge region retained IFN-γ activity of about 36.0%, even in the absence of target antigen (PD-1)-antibody binding in HEK-IFN-γ cells. A23 residue appears critical for IFN-γ biological activity, as all IFN-γ variants comprising A23 mutation greatly reduced IFN-γ activity in the absence of PD-1/anti-PD-1 antibody binding compared to that of “wildtype” IFN-γ, and their IFN-γ activity was rescued in the presence of PD-1/anti-PD-1 antibody binding in HEK-PD-1-IFN-γ cells. Fab-IFN-γ-Fc-PD-1 Ab comprising A23V mutation in IFN-γ (“Fab-IFN-γ(A23V)-Fc-PD-1 Ab”) demonstrated PD-1-positive cell specific IFN-γ biological activity (27.0%), with minimal cross reactivity with PD-1-negative cells (0.6%). Fab-IFN-γ-Fc-PD-1 Ab comprising A23E/D24E/N25K triple mutations in IFN-γ (“Fab-IFN-γ(A23E/D24E/N25K)-Fc-PD-1 Ab”) demonstrated PD-1-positive cell specific IFN-γ biological activity (23.0%), with minimal cross reactivity with PD-1-negative cells (0.2%). These data demonstrate successful generation of anti-PD-1 antibody-based immunocytokines that can specifically target cytokine (e.g., IFN-γ) biological activity towards PD-1-positive cells.

### Example 11: Generation of IFN-γ/Anti-CD4 Immunocytokine (Fab-IFN-γ-Fc-CD4 Ab) with IFN-γ Biological Activity Directed to CD4+ T Cells

[0525] An anti-CD4 antibody comprising Ibalizumab (Trogarzo®) VH (SEQ ID NO: 73) and VL (SEQ ID NO: 74) sequences was used as the parental anti-CD4 full-length antibody, comprising two light chains each comprising the amino acid sequence of SEQ ID NO: 77. To construct heterodimer, one heavy chain comprises a hinge region comprising SEQ ID NO: 42, and an Fc domain subunit comprising SEQ ID NO: 61; the other heavy chain comprises a hinge region comprising SEQ ID NO: 41, and an Fc domain subunit comprising SEQ ID NO: 62. Single chain “wildtype” IFN-γ, or IFN-γ variant comprising various mutations as described in Example 10, was positioned within the hinge region of a heavy chain of the anti-CD4 antibody (see FIG. 2B for exemplary structure), to construct IFN-γ/anti-CD4 immunocytokines “Fab-IFN-γ-Fc-CD4 Ab.” For example, Fab-IFN-γ(A23V)-Fc-CD4 Ab immunocytokine comprises two light chains each comprising the amino acid sequence of SEQ ID NO: 77, one heavy chain comprising the amino acid sequence of SEQ ID NO: 78, and one heavy chain with the single-chain IFN-γ variant (SEQ ID NO: 19) positioned at the hinge region comprising the amino acid sequence of SEQ ID NO: 81. Immunocytokines were constructed, expressed, and purified as described in Example 1.

[0526] IFN-γ can induce PD-L1 expression on cell surface. To assess biological activity of various IFN-γ moiety within the Fab-IFN-γ-Fc-CD4 Ab, HEK-CD4-IFN-γ cells were generated in-house by overexpressing human CD4 in HEK-Blue™ IFN-γ Cells (InvivoGen Cat. #hkb-ifng) using a lentiviral vector. rIFN-γ served as positive control. Anti-PD-1 antibody nivolumab (Opdivo®) and no IFN-γ treatment served as negative controls. Briefly, HEK-Blue™ IFN-γ Cells or HEK-CD4-IFN-γ cells were cultured in the presence of culture medium only (no IFN-γ), rIFN-γ (20 ng/mL), anti-PD-1 antibody (1 μg/mL), or various Fab-IFN-γ-Fc-CD4 Abs (1 μg/mL) at 37° C. in a C02 incubator overnight. The following day, cells were stained with anti-human PD-L1 Allophycocyanin (APC)-conjugated antibody (BioLegend, Cat. #374513) to detect PD-L1 expression. The binding activity of different Fab-IFN-γ-Fc-CD4 Abs (or controls) to HEK-Blue™ IFN-γ Cells or HEK-CD4-IFN-γ cells was reflected as mean fluorescence intensity (MFI) measured using FACS.

TABLE 11
IFN-γ biological activity of Fab-IFN-γ-Fc-CD4
Abs comprising different IFN-γ moieties

| (unit: MFI) | No IFN-γ | rIFN-γ | Anti-PD-1 Ab | “WT” | V22A/A23S |
|---|---|---|---|---|---|
| HEK-IFN-γ cells | 15 | 75 | 14 | 57 | 18 |
| HEK-CD4-IFN-γ cells | 13 | 67 | 15 | 85 | 68 |

| (unit: MFI) | D24A/N25A | A23E/D24E/N25K | A23Q | A23V |
|---|---|---|---|---|
| HEK-IFN-γ cells | 63 | 13 | 17 | 12 |
| HEK-CD4-IFN-γ cells | 81 | 59 | 72 | 68 |

[0527] As can be seen from Table 11, no IFN-γ treatment or anti-PD-1 antibody (negative control) treatment of reporter cells showed base line PD-L1 expression of ˜15 MFI. Positioning “WT” IFN-γ comprising wildtype IFN-γ subunit at the hinge region of the anti-CD4 antibody retained IFN-γ activity of about 57 MFI (compared to free state rIFN-γ of 75 MFI), in the absence of target antigen (CD4)-antibody binding in HEK-IFN-γ cells. Consistent with data in Example 10, A23 residue appears critical for IFN-γ biological activity, as all IFN-γ variants comprising A23 mutation greatly reduced IFN-γ activity close to baseline level (˜15 MFI) in the absence of CD4/anti-CD4 antibody binding compared to that of “WT” IFN-γ or D24A/N25A IFN-γ variant, and their IFN-γ activity was rescued in the presence of CD4/anti-CD4 antibody binding in HEK-CD4-IFN-γ cells. Fab-IFN-γ-Fc-CD4 Ab comprising A23E/D24E/N25K triple mutations in IFN-γ (“Fab-IFN-γ(A23E/D24E/N25K)-Fc-CD4 Ab”) or A23V mutation (“Fab-IFN-γ(A23V)-Fc-CD4 Ab”) demonstrated CD4+ cell specific IFN-γ biological activity (59 MFI or 68 MFI, respectively), with no or little cross reactivity with CD4-negative cells (13 MFI or 12 MFI, respectively, at or below baseline). These data demonstrate successful generation of anti-CD4 antibody-based immunocytokines that can specifically target cytokine (e.g., IFN-γ) biological activity towards CD4-positive cells.

### Example 12: Generation of IFN-α2b/Anti-PD-1 Immunocytokine (Fab-IFN-α2b-Fc-PD-1 Ab) with IFN-α2b Biological Activity Directed to PD-1-Positive Cells

### Construction of IFN-α2b Variants and Immunocytokines Thereof

[0528] IFN-α2b (Intron-A®) is an antiviral or antineoplastic drug. It is a recombinant form of IFN-α2. IFN-α2b variants were constructed by replacing amino acids at positions 30 and 32-34 with Alanine (SEQ ID NOs: 4, 6, 7, and 8; see Table 12). An anti-human PD-1 antibody comprising nivolumab (Opdivo®) VH (SEQ ID NO: 102) and VL (SEQ ID NO: 103) sequences was used as the parental full-length antibody, comprising two light chains each comprising the amino acid sequence of SEQ ID NO: 106. To construct heterodimer, one heavy chain comprises a hinge region comprising SEQ ID NO: 42, and an Fc domain subunit comprising SEQ ID NO: 61; the other heavy chain comprises a hinge region comprising SEQ ID NO: 41, and an Fc domain subunit comprising SEQ ID NO: 62. Various IFN-α2b variants (or wildtype IFN-α2b control “WT”) were positioned within the hinge region of a heavy chain of the anti-PD-1 antibody (see FIG. 2A for exemplary structure), to construct IFN-α2b/anti-PD-1 immunocytokines “Fab-IFN-α2b-Fc-PD-1 Ab.” For example, the Fab-IFN-α2b(L30A)-Fc-PD-1 Ab immunocytokine comprises two light chains each comprising the amino acid sequence of SEQ ID NO: 106, one heavy chain comprising the amino acid sequence of SEQ ID NO: 107, and one heavy chain with the IFN-α2b(L30A) variant (SEQ ID NO: 4) positioned at the hinge region comprising the amino acid sequence of SEQ ID NO: 109. Immunocytokines were constructed, expressed, and purified as described in Example 1.

### IFN-α/β Signal Transduction Assay

[0529] HEK-Blue™ IFN-α/P cells (InvivoGen Cat. #hkb-ifnab) and HEK-PD-I-IFN-α/P cells (generated in-house by overexpressing human PD-1 in HEK-Blue™ IFN-α/β cells using a lentiviral vector) were used to assess IFN-α2b signal activation activity of the various Fab-IFN-α2b-Fc-PD-1 Abs comprising different IFN-α2b moieties, following the InvivoGen user manual (InvivoGen Cat. #hkb-ifnab), hereinafter also referred to as “HEK-IFN-α/D reporter assay” or “HEK-PD-1-IFN-α/β reporter assay.” HEK-Blue™ IFN-α/β reporter cells and HEK-PD-I-IFN-α/β reporter cells were generated by stable transfection of HEK293 cells with the human STAT2 and IRF9 genes to obtain a fully active type I IFN signaling pathway, and inducible SEAP under the control of IFN-α/β inducible ISG54 promoter. The other genes of the pathway (IFNAR1, IFNAR2, JAK1, TyK2, and STAT1) are naturally expressed by these cells. Binding of IFN-α or IFN-β to its heterodimeric receptor consisting of IFNAR1 and IFNAR2 chains triggers JAK/STAT/ISGF3 signaling and subsequent production of SEAP, the level of which in the cell culture supernatant can be monitored using QUANTI-Blue™ (InvivoGen Cat. #rep-qbs). Experimental procedure was similar as described in Example 1 for IL-2 signal transduction assay. IFN-α2b in free state served as positive control and reference for percent activity calculation.

TABLE 12
IFN-α2b biological activity of Fab-IFN-α2b-Fc-PD-1
Abs comprising different IFN-α2b moieties

| | IFN-α2b | | | | | |
|---|---|---|---|---|---|---|
| | (free state) | “WT” | L30A | D32A | R33A | H34A |
| HEK-IFN-α/β cells | 100.0% | 54.0% | 15.0% | 9.0% | 5.0% | 20.0% |
| HEK-PD-1-IFN-α/β cells | 100.0% | 96.0% | 110.0% | 50.0% | 25.0% | 56.0% |

[0530] As can be seen from Table 12, positioning wildtype IFN-α2b at the hinge region of the anti-PD-1 antibody retained IFN-α2b activity of about 54.0%, even in the absence of target antigen (PD-1)-antibody binding in HEK-IFN-α/D cells. L30, D32, R33, and H34 residues all appear critical for IFN-α2b biological activity, as all IFN-α2b variants greatly reduced IFN-α2b activity in the absence of PD-1/anti-PD-1 antibody binding compared to that of wildtype IFN-α2b, and their IFN-α2b activity was rescued in the presence of PD-1/anti-PD-1 antibody binding in HEK-PD-I-IFN-α/p cells. Fab-IFN-α2b-Fc-PD-1 Ab comprising L30A mutation in IFN-α2b (“Fab-IFN-α2b(L30A)-Fc-PD-1 Ab”) demonstrated PD-1-positive cell specific IFN-α2b biological activity (110.0%), with greatly reduced cross reactivity with PD-1-negative cells (15.0%). Fab-IFN-α2b-Fc-PD-1 Ab comprising R33A mutation in IFN-α2b (“Fab-IFN-α2b(R33A)-Fc-PD-1 Ab”) demonstrated PD-1-positive cell specific IFN-α2b biological activity (25.0%), with greatly reduced cross reactivity with PD-1-negative cells (5.0%). These data demonstrate successful generation of anti-PD-1 antibody-based immunocytokines that can specifically target cytokine (e.g., IFN-α2b) biological activity towards PD-1-positive cells, with reduced cytokine biological activity towards PD-1-negative cells.

### Example 13: Placing IL-2 Variant at the Hinge Region of the IL-2/PD-L2-Fc Immunocytokine Significantly Reduces Toxicity in Mice

[0531] Similarly as described in Example 3, a PD-L2-hinge-Fc fusion protein (two PD-L2-hinge-Fc polypeptides each comprising SEQ ID NO: 177) was used as parental antigen-binding protein to construct immunocytokines that bind to PD-1. To construct heterodimeric PD-L2-hinge-Fc fusion protein, one PD-L2-hinge-Fc fusion polypeptide comprises a hinge region comprising SEQ ID NO: 52, and an Fc domain subunit comprising SEQ ID NO: 61; the other PD-L2-Fc fusion polypeptide comprises a hinge region comprising SEQ ID NO: 51, and an Fc domain subunit comprising SEQ ID NO: 62. An IL-2 variant (R38D/K43E/E61R; SEQ ID NO: 2) was either positioned at the hinge region of one PD-L2-hinge-Fc polypeptide (hereinafter referred to as “IL-2(R38D/K43E/E61R)/PD-L2-Fc immunocytokine” or “construct #11”), or fused to the C-terminus of one PD-L2-hinge-Fc polypeptide (hereinafter referred to as “PD-L2-Fc/IL-2(R38D/K43E/E61R) immunocytokine”). IL-2(R38D/K43E/E61R)/PD-L2-Fc immunocytokine comprises one IL-2 fusion polypeptide comprising SEQ ID NO: 180 and one pairing polypeptide comprising SEQ ID NO: 179.

[0532] 25 BALB/c mice were randomly divided into 5 groups (5 mice each group), and intraperitoneally injected with 200 μg or 1000 μg of IL-2(R38D/K43E/E61R)/PD-L2-Fc immunocytokine, PD-L2-Fc/IL-2(R38D/K43E/E61R) immunocytokine, or parental PD-L2-hinge-Fc fusion protein as control. Each group received intraperitoneal injections on Day 1 and Day 5. Mice were monitored daily for four parameters: i) fur texture, ii) reduced activity, iii) morbidity, and iv) weight loss greater than 10%.

[0533] As can be seen from Table 13, when placing IL-2 variant at the C-terminus of the PD-L2-hinge-Fc polypeptide, five out of five mice died 4-6 days post injection, in both high and low dose groups. In contrast, when IL-2 variant was positioned at the hinge region, all mice survived, even administered with high dose of immunocytokines (1000 μg). Same survival rate was observed in the control group (PD-L2-Fc without IL-2 fusion). For immunocytokines with IL-2 variant positioned at the hinge region, toxicity appeared to be dose-dependent, as indicated by increased weight loss and greater reduced activity when dose was increased from 200 μg to 1000 μg.

TABLE 13
In vivo toxicity of IL-2/PD-L2-Fc immunocytokines of different formats

| | Dose | Deaths | |
|---|---|---|---|
| Construct | (μg) | in group | Toxicity symptoms |
| IL-2(R38D/K43E/E61R)/ | 200 | None | Fur texture, reduced activity |
| PD-L2-Fc immunocytokine | 1000 | None | Fur texture, reduced activity, |
| (IL-2 positioned at | | | weight loss |
| hinge region; | | | |
| construct #11) | | | |
| PD-L2-Fc/IL-2(R38D/ | 200 | 5/5 | Fur texture, reduced activity, |
| K43E/E61R) immunocytokine | | | weight loss, morbidity |
| (IL-2 fused to the | 1000 | 5/5 | Fur texture, reduced activity, |
| C′ of Fc) | | | weight loss, morbidity |
| Parental PD-L2-hinge-Fc | 1000 | None | None |
| fusion protein (control) | | | |

### Example 14: Placing IL-12 Variant at the Hinge Region of the IL-12/Anti-PD-1 Immunocytokine Significantly Reduces Toxicity in Mice

### Construction of IL-12 Variants and Immunocytokines Thereof

[0534] Similarly as described in Example 4, 3 single chain IL-12 variants were generated. “IL-12 (F60A)” (SEQ ID NO: 275) comprises from N′ to C′: p40 F60A variant subunit (SEQ ID NO: 33)—linker (SEQ ID NO: 228)—p35 wildtype subunit (SEQ ID NO: 29). “IL-12 (G64A)” comprises from N′ to C′: p40 F60A variant subunit (SEQ ID NO: 34)—linker (SEQ ID NO: 228)—p35 wildtype subunit (SEQ ID NO: 29). “IL-12 (E59A/F60A)” (SEQ ID NO: 36) comprises from N′ to C′: p40 E59A/F60A variant subunit (SEQ ID NO: 31)—linker (SEQ ID NO: 228) —p35 wildtype subunit (SEQ ID NO: 29).

[0535] As described in Example 4, IL-12(E59A/F60A)/anti-PD-1 immunocytokine (construct #48) comprises two light chains each comprising the sequence of SEQ ID NO: 106, one heavy chain comprising the sequence of SEQ ID NO: 107, and one heavy chain with the single-chain IL-12(E59A/F60A) variant (SEQ ID NO: 36) positioned at the hinge region comprising the amino acid sequence of SEQ ID NO: 112. The single-chain IL-12(E59A/F60A) variant within IL-12(E59A/F60A)/anti-PD-1 immunocytokine was replaced with either single-chain IL-12 (F60A) variant (SEQ ID NO: 275) or single-chain IL-12 (G64A) variant (SEQ ID NO: 332) to construct IL-12(F60A)/anti-PD-1 immunocytokine and IL-12(G64A)/anti-PD-1 immunocytokine, respectively. Immunocytokines were constructed, expressed, and purified as described in Example 1.

[0536] 30 BALB/c mice were randomly divided into 6 groups (5 mice each group), and intraperitoneally injected with 200 μg or 1000 μg of IL-12(F60A)/anti-PD-1 immunocytokine, IL-12(G64A)/anti-PD-1 immunocytokine, or IL-12(E59A/F60A)/anti-PD-1 immunocytokine. Each group received intraperitoneal injections on Day 1 and Day 5. Mice were monitored daily for four parameters: i) fur texture, ii) reduced activity, iii) morbidity, and iv) weight loss greater than 10%.

[0537] As can be seen from Table 14, IL-12/anti-PD-1 immunocytokine comprising IL-12 (G64A) variant showed the highest toxicity, as indicated by the death of 4/5 mice in low dose group and the death of 5/5 mice in high dose group. In contrast, treatment with IL-12/anti-PD-1 immunocytokine comprising IL-12 (F60A) variant only induced one death in high dose group (1000 μg) and no death in low dose group (200 μg); treatment with IL-12/anti-PD-1 immunocytokine comprising IL-12 (E59A/F60A) variant did not induce death in either dose. IL-12/anti-PD-1 immunocytokine comprising IL-12 double mutation E59A/F60A also demonstrated less toxicity compared to that comprising IL-12 single F60A mutation, as indicated by the differences in severity of toxicity symptoms.

TABLE 14
In vivo toxicity of IL-12/anti-PD-1 immunocytokines

| | Dose | Deaths | |
|---|---|---|---|
| Construct | (μg) | in group | Toxicity symptoms |
| IL-12(F60A)/anti-PD-1 | 200 | None | Fur texture, reduced activity |
| immunocytokine | 1000 | 1/5 | Fur texture, reduced activity, |
| | | | weight loss, morbidity |
| IL-12(G64A)/anti-PD-1 | 200 | 4/5 | Fur texture, reduced activity, |
| immunocytokine | | | weight loss, morbidity |
| (construct #47) | 1000 | 5/5 | Fur texture, reduced activity, |
| | | | weight loss, morbidity |
| IL-12(E59A/F60A)/anti- | 200 | None | Fur texture (moderate) |
| PD-1 immunocytokine | | | |
| (construct #48) | 1000 | None | Fur texture, reduced activity |

### Example 15: Replacing Anti-PD-1 Parental Antibody with PD-L2-Hinge-Fc Fusion Protein Significantly Reduces Toxicity of IL-12 Immunocytokines

### Construction of IL-12/PD-L2-Fc Immunocytokines

[0538] A PD-L2-hinge-Fc fusion protein (two PD-L2-hinge-Fc polypeptides each comprising SEQ ID NO: 177) was used as parental antigen-binding protein to construct immunocytokines that bind to PD-1. To construct heterodimeric PD-L2-hinge-Fc fusion protein, one PD-L2-hinge-Fc fusion polypeptide comprises a hinge region comprising SEQ ID NO: 52, and an Fc domain subunit comprising SEQ ID NO: 61; the other PD-L2-Fc fusion polypeptide comprises a hinge region comprising SEQ ID NO: 51, and an Fc domain subunit comprising SEQ ID NO: 62. Single chain IL-12 variant (F60A, G64A, or E59A/F60A) as described in Example 14 was either positioned at the hinge region of one PD-L2-hinge-Fc polypeptide (hereinafter referred to as “IL-12/PD-L2-Fc immunocytokine”), or fused to the C-terminus of one PD-L2-hinge-Fc polypeptide (hereinafter referred to as “PD-L2-Fc/IL-12 immunocytokine”). For example, IL-12(E59A/F60A)/PD-L2-Fc immunocytokine (“construct #29”) comprises one IL-12 fusion polypeptide comprising SEQ ID NO: 186 (from N′ to C′: PD-L2 extracellular domain (SEQ ID NO: 176)—GSG linker (SEQ ID NO: 203)—single chain IL-12(E59A/F60A) variant (SEQ ID NO: 36)—hinge (SEQ ID NO: 52)—Fc domain subunit (SEQ ID NO: 61)); and one pairing polypeptide comprising SEQ ID NO: 185 (from N′ to C′: PD-L2 extracellular domain (SEQ ID NO: 176)—GSG linker—hinge (SEQ ID NO: 51)—Fc domain subunit (SEQ ID NO: 62)). The single chain IL-12(E59A/F60A) variant within IL-12(E59A/F60A)/PD-L2-Fc immunocytokine was replaced with either single-chain IL-12 (F60A) variant (SEQ ID NO: 275) or single-chain IL-12 (G64A) variant (SEQ ID NO: 332) to construct IL-12(F60A)/PD-L2-Fc immunocytokine (“construct #30”) and IL-12(G64A)/PD-L2-Fc immunocytokine, respectively. For example, IL-12(F60A)/PD-L2-Fc immunocytokine comprises one IL-12 fusion polypeptide comprising SEQ ID NO: 274 (from N′ to C′: PD-L2 extracellular domain (SEQ ID NO: 176)—GSG linker (SEQ ID NO: 203)—single chain IL-12(F60A) variant (SEQ ID NO: 275)—hinge (SEQ ID NO: 52) —Fc domain subunit (SEQ ID NO: 61)); and one pairing polypeptide comprising SEQ ID NO: 185 (from N′ to C′: PD-L2 extracellular domain (SEQ ID NO: 176)—GSG linker (SEQ ID NO: 203)—hinge (SEQ ID NO: 51)—Fc domain subunit (SEQ ID NO: 62)). PD-L2-Fc/IL-12(F60A) immunocytokine (“construct #34”) comprises one IL-12 fusion polypeptide comprising SEQ ID NO: 276 (from N′ to C′: PD-L2 extracellular domain (SEQ ID NO: 176)—GSG linker (SEQ ID NO: 203)—hinge (SEQ ID NO: 52)—Fc domain subunit (SEQ ID NO: 61) —GGGGSGGGGSGGGGS linker (SEQ ID NO: 229)—single chain IL-12(F60A) variant (SEQ ID NO: 275)); and one pairing polypeptide comprising SEQ ID NO: 185 (from N′ to C′: PD-L2 extracellular domain (SEQ ID NO: 176)—GSG linker (SEQ ID NO: 203)—hinge (SEQ ID NO: 51)—Fc domain subunit (SEQ ID NO: 62)). Immunocytokines were constructed, expressed, and purified as described in Example 1.

[0539] 50 BALB/c mice were randomly divided into 10 groups (5 mice each group), and intraperitoneally injected with 200 μg or 1000 μg of: i) IL-12(F60A)/PD-L2-Fc immunocytokine, ii) IL-12(G64A)/PD-L2-Fc immunocytokine, iii) IL-12(E59A/F60A)/PD-L2-Fc immunocytokine, iv) PD-L2-Fc/IL-12(F60A) immunocytokine (IL-12 at C′ of Fc), or v) PD-L2-Fc/IL-12(E59A/F60A) immunocytokine (IL-12 at C′ of Fc). Each group received intraperitoneal injections on Day 1 and Day 5. Mice were monitored daily for four parameters: i) fur texture, ii) reduced activity, iii) morbidity, and iv) weight loss greater than 10%.

[0540] As can be seen from Table 15, among immunocytokines with IL-12 variant positioned at the hinge region, IL-12/PD-L2-Fc immunocytokine comprising IL-12 (G64A) variant showed the highest toxicity, as indicated by the death of 3/5 mice in low dose group and the death of 5/5 mice in high dose group. This is consistent with the highest toxicity results of IL-12 (G64A) among all IL-12 variants in Example 14. When placing IL-12 (F60A) variant at the C-terminus of the PD-L2-hinge-Fc polypeptide, 2 out of 5 mice died in high dose group. In contrast, when IL-12 (F60A) variant was positioned at the hinge region, all mice survived, even administered with high dose of immunocytokines (1000 μg). Consistent with results in Example 14, IL-12/PD-L2-Fc immunocytokine comprising IL-12 double mutation E59A/F60A demonstrated less toxicity compared to that comprising IL-12 single F60A mutation, no matter IL-12 variant was positioned at the hinge region or at the C-terminus of Fc, as indicated by the differences in severity of toxicity symptoms. Dose-dependent toxicity was observed for most immunocytokines, as indicated by increased severity of toxicity symptoms such as worse fur texture, increased weight loss, and/or greater reduced activity when dose was increased from 200 μg to 1000 μg. IL-12(E59A/F60A)/PD-L2-Fc immunocytokine comprising IL-12 variant positioned at the hinge region actually demonstrated the least toxicity in vivo among all IL-12/PD-L2-Fc and PD-L2-Fc/IL-12 immunocytokines, with 0 death rate and no toxicity symptom even when administered at high dose.

[0541] Comparing Table 14 and Table 15, our results indicate that replacing anti-PD-1 antigen-binding fragment with PD-L2 ligand in the IL-12-based immunocytokines can further reduce overall toxicity. For example, compare 3/5 death rate in low dose group of IL-12(G64A)/PD-L2-Fc immunocytokine vs. 4/5 death rate in low dose group of IL-12(G64A)/anti-PD-1 immunocytokine; compare 0 death rate in high dose group of IL-12(F60A)/PD-L2-Fc immunocytokine vs. 1/5 death rate in high dose group of IL-12(F60A)/anti-PD-1 immunocytokine. When comparing toxicity symptoms between the respective IL-12 variant immunocytokines in Example 14 and Example 15, the lower toxicity of PD-L2-Fc based immunocytokines is even more obvious. For example, IL-12(E59A/F60A)/PD-L2-Fc immunocytokine (construct #29) completely eliminated toxicity symptom compared to IL-12(E59A/F60A)/anti-PD-1 immunocytokine (construct #48), administered with either low or high dose; IL-12(F60A)/PD-L2-Fc immunocytokine (#30) showed fewer toxicity symptoms (fur texture only) compared to those of IL-12(F60A)/anti-PD-1 immunocytokine, either in low or high dose group. The reduced toxicity seen in PD-L2-Fc based IL-12 immunocytokines was likely due to stimulated PD-1 inhibitory immune checkpoint signaling upon PD-L2-PD-1 binding, which created an immunosuppression signal that “balances” against the immunostimulating/pro-inflammatory activity of IL-12.

TABLE 15
In vivo toxicity of IL-12/PD-L2-Fc immunocytokines

| | | Dose | | |
|---|---|---|---|---|
| Position | Construct | (μg) | Deaths | Toxicity Symptoms |
| Hinge | IL-12(F60A)/PD-L2-Fc | 200 | None | Fur texture (moderate) |
| | immunocytokine | 1000 | None | Fur texture |
| | (construct #30) | | | |
| | IL-12(G64A)/PD-L2-Fc | 200 | 3/5 | Fur texture, reduced activity, |
| | immunocytokine | | | weight loss, morbidity |
| | | 1000 | 5/5 | Fur texture, reduced activity, |
| | | | | weight loss, morbidity |
| | IL-12(E59A/F60A)/ | 200 | None | None |
| | PD-L2-Fc immunocytokine | 1000 | None | None |
| | (construct #29) | | | |
| C- | PD-L2-Fc/IL-12(F60A) | 200 | none | Fur texture, reduced activity, |
| terminus | immunocytokine | | | weight loss |
| | (construct #34) | 1000 | 2/5 | Fur texture, reduced activity, |
| | | | | weight loss, morbidity |
| | PD-L2-Fc/IL-12(E59A/ | 200 | None | Fur texture |
| | F60A) | 1000 | None | Fur texture, reduced activity, |
| | immunocytokine | | | weight loss |

### Example 16: In Vivo Efficacy of IL-12 Immunocytokines in 4T1 Syngeneic Tumor Mice Model

### Construction of IL-12(E59A/F60A)/IL-2(R38D/K43E/E61R)/Anti-PD-1 Immunocytokine

[0542] As described in Examples 3 and 4, an anti-human PD-1 antibody comprising nivolumab (Opdivo®) VH (SEQ ID NO: 102) and VL (SEQ ID NO: 103) sequences was used as the parental full-length antibody, comprising two light chains each comprising the amino acid sequence of SEQ ID NO: 106. To construct heterodimer, one heavy chain comprises a hinge region comprising SEQ ID NO: 42, and an Fc domain subunit comprising SEQ ID NO: 61; the other heavy chain comprises a hinge region comprising SEQ ID NO: 41, and an Fc domain subunit comprising SEQ ID NO: 62. The IL-2 R38D/K43E/E61R variant (SEQ ID NO: 2) was positioned within the hinge region of one heavy chain of the heterodimeric anti-PD-1 antibody, and the single-chain IL-12 E59A/F60A variant (SEQ ID NO: 36) was positioned within the hinge region of the other heavy chain of the heterodimeric anti-PD-1 antibody, to construct the “IL-12(E59A/F60A)/IL-2(R38D/K43E/E61R)/anti-PD-1 immunocytokine” (or “construct #54”). The immunocytokine was expressed and purified as described in Example 1.

[0543] Mice (˜20 g body weight) were inoculated with 0.25×10⁶ 4T1 murine breast cancer cells. Seven days after tumor inoculation, tumor size was measured to be about 50-150 mm³. After measuring tumor size, mice were injected with 10 mg/kg (˜200 μg) IL-12(E59A/F60A)/anti-PD-1 immunocytokine (constructed in Examples 4 and 14; construct #48 in FIG. 5), 10 mg/kg (˜200 pg) IL-12(E59A/F60A)/PD-L2-Fc immunocytokine (constructed in Example 15; construct #29 in FIG. 5), 5 mg/kg (˜100 μg) IL-12(E59A/F60A)/IL-2(R38D/K43E/E61R)/anti-PD-1 immunocytokine (construct #54 in FIG. 5), or PBS (negative control). A total of three injections (10 mg/kg or 5 mg/kg per injection, respectively) were given on days 7, 13, and 19 post-inoculation (indicated by black arrows in FIG. 5). Tumor size was measured every 3 days since the first injection. Mice were sacrificed once tumor size reached over 2000 mm³.

[0544] Breast cancer as reflected by 4T1 mice model is highly resistant to current immunotherapies, including anti-PD-1, anti-CTLA-4, and combination treatment with anti-PD-1 and anti-CTLA-4 antibodies. As can be seen from FIG. 5, all three IL-12 immunocytokines significantly inhibited 4T1 tumor growth, demonstrating promising in vivo efficacy.

[0545] Further, IL-12(E59A/F60A)/anti-PD-1 (#48) and IL-12(E59A/F60A)/PD-L2-Fc (#29) showed similar cytotoxicity against 4T1 tumor when administered at the same dose (FIG. 5). In combination with results from Examples 14 and 15, these data further demonstrate that compared to anti-PD-1 antigen-binding domain which blocks PD-1 immunosuppression signal, using PD-L2 extracellular domain in the immunocytokine construct can not only achieve similar anti-tumor effect, but also reduce unwanted toxicity, likely by balancing the immunostimulating/pro-inflammatory activity of cytokines (e.g., IL-12) with an immunosuppression signal from PD-L2/PD-I signaling.

### Example 17: In Vivo Efficacy of IL-12 Immunocytokines and IL-2 Immunocytokines in EMT6 Syngeneic Tumor Mice Model

[0546] Mice (˜20 g body weight) were inoculated with 0.25×10⁶ EMT6 murine breast cancer cells. Seven days after tumor inoculation, tumor size was measured to be about 50-150 mm³. After measuring tumor size, mice were injected with 10 mg/kg (˜200 μg) IL-I2(E59A/F60A)/anti-PD-1 immunocytokine (constructed in Examples 4 and 14; construct #48 in FIG. 6), 10 mg/kg (˜200 pg) IL-12(E59A/F60A)/PD-L2-Fc immunocytokine (constructed in Example 15; construct #29 in FIG. 6), 10 mg/kg (˜200 μg) IL-2(R38D/K43E/E61R)/PD-L2-Fc immunocytokine (constructed in Example 3; construct #11 in FIG. 6), or PBS (negative control). A total of three injections (10 mg/kg per injection) were given on days 7, 13, and 19 post-inoculation (indicated by black arrows in FIG. 6). Tumor size was measured every 3 days since the first injection. Mice were sacrificed once tumor size reached over 2000 mm³.

[0547] EMT6 tumor growth is resistant to anti-PD-1 immunotherapy. As can be seen from FIG. 6, all immunocytokine significantly inhibited EMT6 tumor growth, of which IL-12(E59A/F60A)/anti-PD-1 and IL-2(R38D/K43E/E61R)/PD-L2-Fc immunocytokines demonstrated better efficacy compared to IL-12(E59A/F60A)/PD-L2-Fc immunocytokine. The slightly lower efficacy seen in PD-L2-Fc based IL-12 immunocytokine was likely due to stimulated PD-1 inhibitory immune checkpoint signaling upon PD-L2-PD-1 binding, which created an immunosuppression signal that “balances” against the immunostimulating/pro-inflammatory activity of IL-12.

### Example 18: In Vivo Efficacy of IL-12 Immunocytokines in CT26 Syngeneic Tumor Mice Model

[0548] Mice (˜20 g body weight) were inoculated with 0.25×10⁶ CT26 murine colon cancer cells. When tumor size reached about 100-200 mm³ (about day 11 post-inoculation), mice were injected with 10 mg/kg IL-12(F60A)/PD-L2-Fc immunocytokine (constructed in Example 15; construct #30; 5 mice), 10 mg/kg PD-L2-Fc/IL-12(F60A) immunocytokine (constructed in Example 15; construct #34; 5 mice), or PBS (negative control). A total of three injections (10 mg/kg per injection) were given on days 11, 14, and 18 post-inoculation (indicated by black arrows in FIGS. 7A and 7B). Tumor size was recorded over time. Mice were sacrificed once tumor size reached over 2000 mm³. Tumor size in parenthesis of FIG. 7A indicates average tumor size (±standard deviation) of each group when the first treatment was administered.

[0549] As can be seen in FIGS. 7A and 7B, PD-L2-Fc/IL-12(F60A) immunocytokine (#34) successfully inhibited tumor growth in all five mice (100% cure rate), and IL-12(F60A)/PD-L2-Fc immunocytokine (#30) successfully inhibited tumor growth in four out of five mice (80% cure rate). Among cured mice, the tumor inhibition efficacy of both IL-12 immunocytokines was similar, suggesting no significant efficacy difference between IL-12 hinge fusion and C-terminus fusion. This result shows both IL-12 immunocytokines tested can completely regress CT26 syngeneic colon tumors in mice.

### Example 19: In Vivo Efficacy of IL-12 Immunocytokines as a Cancer Vaccine Against CT26 Tumors

[0550] To investigate if immunocytokines described herein can function as cancer vaccine, or prevent cancer recurrence, a tumor re-challenge was conducted on all cured mice from Example 18. Thirty days after the final immunocytokine injection, cured mice were inoculated with 0.25×10⁶ CT26 murine colon cancer cells on the right flank and 0.25×10⁶ EMT6 murine breast cancer cells on the left flank (as control). Tumor sizes were recorded every 4 days following re-challenge tumor inoculation.

[0551] As shown in FIG. 8, all cured mice previously treated with immunocytokines against CD26 tumor were protected from CT26 tumor re-challenge but not from EMT6. IL-12(F60A)/PD-L2-Fc immunocytokine (#30) and PD-L2-Fc/IL-12(F60A) immunocytokine (#34) demonstrated similar protection efficacy against CT26 tumor re-challenge. These results indicate successful generation of anti-CT26 tumor memory, suggesting that immunocytokines described herein, such as both PD-L2-Fc/IL-12(F60A) immunocytokine (#34) and IL-12(F60A)/PD-L2-Fc immunocytokine (#30), can serve as a cancer vaccine (e.g., against CT26 colon cancer) in mice, and/or can prevent cancer recurrence.

### Example 20: In Vivo Efficacy of IL-12 Immunocytokines in Late-Stage CT26 Syngeneic Tumor Mice Model

[0552] Successful therapies for late-stage cancers remain a huge unmet clinical need. To study if immunocytokines described herein are effective in treating late-stage cancers, mice were inoculated with cancer cells, tumor was allowed to grow to bigger than 250 mm³, which is considered untreatable with immunotherapy in mice. Such murine tumor volume may mimic tumor burdens in advanced, late-stage human cancer patients.

[0553] Briefly, mice (˜20 g body weight) were inoculated with 0.25×10⁶ CT26 murine colon cancer cells. When tumor size reached about 250-400 mm³, mice were injected with 20 mg/kg IL-12(E59A/F60A)/PD-L2 Fc immunocytokine (constructed in Example 15; construct #29; 7 mice) or 10 mg/kg IL-12(F60A)/PD-L2-Fc immunocytokine (constructed in Example 15; construct #30; 5 mice). A total of five injections were given on days 11, 15, 20, 26, and 30 post-inoculation for mice treated with construct #29, or on days 22, 26, 30, 34, and 38 post-inoculation for mice treated with construct #30 (indicated by black arrows in FIG. 9). Tumor size in parenthesis of FIG. 9 indicates tumor size of each mouse when the first treatment was administered, which was similar to or bigger than 250 mm³. Tumor size was recorded over time.

[0554] As shown in FIG. 9, all mice receiving IL-12(F60A)/PD-L2-Fc immunocytokine (#30) had significantly reduced tumor size (100% cure rate); while 5/7 (71.4% cure rate) mice receiving IL-12(E59A/F60A)/PD-L2 Fc immunocytokine (#29) had significantly reduced tumor size. These indicate that both IL-12 immunocytokines are effective in treating late-stage cancer (e.g., late stage colon cancer). The efficacy difference seen was due to lower potency (e.g., receptor binding and/or signal activation ability) of double mutation IL-12(E59A/F60A) compared to single mutation IL-12(F60A). Such efficacy difference may be compensated by higher dosing per injection (e.g., 20 mg/kg vs. 10 mg/kg), or more injections (e.g., increase from 3 to 5 injections) of IL-12(E59A/F60A)-based immunocytokines.

[0555] FIG. 10 shows one exemplary mouse inoculated with CT26 tumor, the initial tumor volume was measured to be 290.6 mm³. Pictures were taken on 0, 7, and 14 days after initial injection of IL-12(F60A)/PD-L2-Fc immunocytokine (#30), indicating successful regression of huge tumor (equivalent to advanced, late-stage human cancer).

### Example 21: In Vivo Efficacy of IL-12 Immunocytokines in EMT6 Syngeneic Tumor Mice Model

[0556] Mice (˜20 g body weight) were inoculated with 0.25×10⁶ EMT6 murine breast cancer cells. When tumor size reached about 50-100 mm³ (˜7 days after tumor inoculation), mice were injected with 10 mg/kg IL-12(E59A/F60A)/PD-L2 Fc immunocytokine (constructed in Example 15; construct #29), 10 mg/kg IL-12(F60A)/PD-L2-Fc immunocytokine (constructed in Example 15; construct #30), 10 mg/kg IL-12(E59A/F60A)/anti-PD-1 immunocytokine (constructed in Example 4; construct #48), or PBS (negative control). A total of three injections (10 mg/kg per injection) were given on days 7, 12, and 16 post-innoculation (indicated by black arrows in FIGS. 11A and 11B). Tumor size was recorded over time. Mice were sacrificed once tumor size reached over 1500 mm³. Tumor size in parenthesis of FIG. 11A indicates average tumor size (±standard deviation) of each group when the first treatment was administered.

[0557] As seen in FIGS. 11A and 11B, IL-12(E59A/F60A)/PD-L2 Fc immunocytokine (#29) successfully inhibited tumor growth in 3/5 mice (60% cure rate); IL-12(F60A)/PD-L2-Fc immunocytokine (#30) and IL-12(E59A/F60A)/anti-PD-1 immunocytokine (#48) both successfully inhibited tumor growth in all five mice (100% cure rate). The initial average tumor size of the mouse group treated with IL-12(E59A/F60A)/anti-PD-1 immunocytokine (#48) was more than twice of that of the other two test groups. These results show all three IL-12 immunocytokines tested can completely regress EMT6 syngeneic breast tumors in mice, with anti-PD-1 based immunocytokine having the best efficacy.

### Example 22: In Vivo Efficacy of IL-12 Immunocytokines as a Cancer Vaccine Against EMT6 Tumors

[0558] To investigate if immunocytokines described herein can function as cancer vaccine, or prevent cancer recurrence, a tumor re-challenge was conducted on all cured mice from Example 21. Thirty days after the final immunocytokine injection, cured mice were inoculated with 0.25×10⁶ EMT6 murine breast cancer cells on the right flank and 0.25×10⁶ CT26 murine colon cancer cells on the left flank (as control). Tumor sizes were recorded every 4 days following re-challenge tumor inoculation.

[0559] As seen in FIG. 12, all cured mice previously treated with immunocytokines against EMT6 tumor were protected from EMT6 tumor re-challenge but not from CT26. Further, all three IL-12 immunocytokines demonstrated similar protection efficacy against EMT6 tumor re-challenge. These results indicate successful generation of anti-EMT6 tumor memory, suggesting that immunocytokines described herein, such as IL-12(E59A/F60A)/PD-L2 Fc immunocytokine (#29), IL-12(F60A)/PD-L2-Fc immunocytokine (#30), and IL-12(E59A/F60A)/anti-PD-1 immunocytokine (#48), can serve as a cancer vaccine (e.g., against breast cancer (such as EMT6) tumors) in mice, and/or can prevent cancer recurrence.

### Example 23: In Vivo Efficacy of IL-12 Immunocytokines in 4T1 Triple Negative Breast Cancer (TNBC) Orthotopic Tumor Mice Model

[0560] 4T1 is a standard murine mammary tumor model used in preclinical studies on breast cancer metastasis. 4T1 is a refractory model for immunotherapy and does not respond to anti-PD-1, anti-CTLA-4, or combination of anti-PD-1 and anti-CTLA-4 antibody therapy. Mammary fat pad injection of 4T1 can reproducibly generate 4T1 breast-cancer-derived lung metastases.

[0561] To test the therapeutic efficacy of immunocytokines described herein on immunotherapy-resistant cancer types as well as cancer metastasis, mice (˜20 g body weight) were inoculated with 0.25×10⁶ 4T1 murine breast cancer cells in the #3 mammary gland fat pad. Tumor development was monitored for approximately 21-30 days. Four days after tumor inoculation, mice were injected with 20 mg/kg (per injection) IL-12(E59A/F60A)/PD-L2-Fc immunocytokine (constructed in Example 15; construct #29), 20 mg/kg (per injection) IL-12(F60A)/PD-L2-Fc immunocytokine (constructed in Example 15; construct #30), a combination of 10 mg/kg anti-PD-1 antibody and 10 mg/kg anti-CTLA-4 antibody (per injection), or PBS (negative control). A total of five injections were given every four days. Mice were sacrificed after four weeks and primary tumor was extracted from the mammary fat pad.

[0562] As seen in FIG. 13, compared to PBS control, IL-12(F60A)/PD-L2-Fc immunocytokine (#30) inhibited 4T1 growth in mammary gland in all mice tested, IL-12(E59A/F60A)/PD-L2-Fc immunocytokine (#29) inhibited 4T1 growth in mammary gland in 1 out of 3 mice tested, while anti-PD-1+anti-CTLA-4 combination treatment failed inhibiting 4T1 growth in mammary gland in all 3 mice tested. As discussed above, the efficacy difference was likely due to lower potency (e.g., receptor binding and/or signal activation ability) of double mutation IL-12(E59A/F60A) compared to single mutation IL-12(F60A). Such efficacy difference may be compensated by higher dosing per injection (e.g., 40 mg/kg vs. 20 mg/kg), or more injections (e.g., increase from 5 to 7 injections) of IL-12(E59A/F60A)-based immunocytokines.

[0563] To investigate the therapeutic efficacy on cancer metastasis, lungs were retrieved from sacrificed mice. Lung tissue was resuspended in collagenase/DNase solution and filtered through a 70 μm cell strainer. Cells were washed with PBS and resuspended in media. Four 1:10 serial dilutions were made. Cells were cultured in a 7% C02 incubator at 37° C. for 14 days to allow the formation of 4T1 cell colonies.

[0564] As seen in FIG. 14, IL-12(E59A/F60A)/PD-L2-Fc immunocytokine (#29) and IL-12(F60A)/PD-L2-Fc immunocytokine (#30) both significantly inhibited 4T1 metastasis in the lungs compared to the combination of anti-PD-1 and anti-CTLA-4 antibodies, or PBS (negative control). These findings were statistically significantly different (p-value≤0.001).

[0565] These data demonstrating promising in vivo efficacy of IL-12 immunocytokines in treating advanced and/or hard-to-treat breast cancer (e.g., TNBC), inhibiting cancer metastasis, and possibly in treating other cancer types that are resistant to current immunotherapies.

### Example 24: In Vivo Efficacy of IL-12 Immunocytokines in B16 Syngeneic Tumor Mice Model

[0566] B16 a murine melanoma tumor cell line used for research as a model for human skin cancers. B16 is a refractory model for immunotherapy and does not respond to anti-PD-1, anti-CTLA-4, or combination of anti-PD-1 and anti-CTLA-4 antibody therapy.

[0567] To test the therapeutic efficacy of immunocytokines described herein on more immunotherapy-resistant cancer types, mice (˜20 g body weight) were inoculated with 0.25×10⁶ B16 murine melanoma cells. When tumor size reached about 50-100 mm³, mice were injected with 10 mg/kg IL-12(F60A)/PD-L2-Fc immunocytokine (constructed in Example 15; construct #30), 10 mg/kg PD-L2-Fc/IL-12(F60A) immunocytokine (constructed in Example 15, construct #34), or PBS (negative control). A total of three injections (10 mg/kg per injection) were given on days 10, 13, and 16 post-innoculation (indicated by black arrows in FIGS. 15A and 15B). Tumor size was recorded over time. Mice were sacrificed once tumor size reached over 1000 mm³. Tumor size in parenthesis of FIG. 15A indicates average tumor size (±standard deviation) of each group when the first treatment was administered.

[0568] As seen in FIGS. 15A and 15B, compared to PBS treatment group in which B16 tumor grew drastically since day 13 post-innoculation, PD-L2-Fc/IL-12(F60A) immunocytokine (#34) and IL-12(F60A)/PD-L2-Fc immunocytokine (#30) both significantly inhibited B16 tumor growth until after day 24 post-innoculation, indicating that both IL-12 immunocytokines can slow down tumor progression and/or extend life-span of individuals with immunotherapy-resistant cancers (e.g., melanoma), demonstrating promising in vivo efficacy.

### Example 25: In Vivo Efficacy of IL-12 Immunocytokines in LL2 Syngeneic Tumor Mice Model

[0569] LL2 murine lung carcinoma model is a refractory model for immunotherapy that does not respond to anti-PD-1, anti-CTLA-4, or combination of anti-PD-1 and anti-CTLA-4 antibody therapy.

[0570] To test the therapeutic efficacy of immunocytokines described herein on more immunotherapy-resistant cancer types, mice (˜20 g body weight) were inoculated with 0.25×10⁶ LL2 murine lung cancer cells. When tumor size reached about 50-100 mm³ (˜16 days post-inoculation), mice were injected with 10 mg/kg IL-12(F60A)/PD-L2-Fc immunocytokine (constructed in Example 15; construct #30), 10 mg/kg PD-L2-Fc/IL-12(F60A) immunocytokine (constructed in Example 15, construct #34), or PBS (negative control). A total of three injections (10 mg/kg per injection) were given on days 16, 20, and 23 post-innoculation (indicated by black arrows in FIGS. 16A and 16B). Tumor size was recorded over time. Mice were sacrificed once tumor size reached over 1000 mm³. Tumor size in parenthesis of FIG. 16A indicates average tumor size (±standard deviation) of each group when the first treatment was administered.

[0571] As seen in FIGS. 16A and 16B, compared to PBS treatment group in which LL2 tumor grew drastically since about day 20 post-innoculation, PD-L2-Fc/IL-12(F60A) immunocytokine (#34) and IL-12(F60A)/PD-L2-Fc immunocytokine (#30) significantly inhibited LL2 tumor growth until after day 32-35 post-innoculation, indicating that both IL-12 immunocytokines can slow down tumor progression and/or extend life-span of individuals with immunotherapy-resistant cancers (e.g., lung cancer), demonstrating promising in vivo efficacy.

[0572] To summarize, above data (e.g., see Examples 23-25) demonstrate promising in vivo efficacy of immunocytokines described herein (e.g., IL-12/PD-L2-Fc based immunocytokines) in treating various advanced and/or hard-to-treat cancer types (e.g., TNBC, melanoma, lung cancer), inhibiting cancer metastasis, treating or delaying tumor progression of cancer types that are resistant to current immunotherapies (e.g., anti-PD-1 therapy, anti-CTLA-4 therapy, or a combination therapy thereof), and/or extending life-span of such patients.

### Example 26: Position of Cytokine or Variant Thereof within the Immunocytokine Affects Non-Specific Activities of the Immunocytokine

[0573] Two immunocytokine designs were generated to test whether placement of the cytokine or variant thereof at the hinge region (between antigen-binding domain and Fc fragment; hidden format) or at the C-terminus of the Fc fragment (e.g., C′ of antibody heavy chain; exposed format) could affect the targeted activity of the cytokine or variant thereof. The first design incorporated the cytokine at the hinge region of one heavy chain of an anti-PD-1 antibody: within the hinge region between CH1 and CH2 (the immunocytokines were named in the format of “IL-12/anti-PD-1”). The second design fused the cytokine to the C-terminus of one heavy chain of an anti-PD-1 antibody through a linker (the immunocytokines were named in the format of “anti-PD-1/IL-12”), which is a common design among current immunocytokines.

[0574] An anti-human PD-1 antibody comprising nivolumab (Opdivo®) VH (SEQ ID NO: 102) and VL (SEQ ID NO: 103) sequences was used as the parental full-length antibody, comprising two light chains each comprising the amino acid sequence of SEQ ID NO: 106. To construct heterodimer, one heavy chain comprises a hinge region comprising SEQ ID NO: 42, and an Fc domain subunit comprising SEQ ID NO: 61; the other heavy chain comprises a hinge region comprising SEQ ID NO: 41, and an Fc domain subunit comprising SEQ ID NO: 62.

[0575] IL-12(E59A/F60A)/anti-PD-1 immunocytokine (construct #48), IL-12(E59A)/anti-PD-1 immunocytokine (construct #46), and IL-12(G64A)/anti-PD-1 immunocytokine (construct #47) with IL-12 variant (single-chain N′ to C′ IL-12B (p40 variant)-linker-IL-12A (wt p35)) positioned within the hinge region of one heavy chain of the heterodimeric anti-PD-1 antibody were constructed as described in Examples 4 and 14.

[0576] To make the heavy chain C′ cytokine fusion constructs, single-chain IL-12(E59A) variant (SEQ ID NO: 331), single-chain IL-12(G64A) variant (SEQ ID NO: 332), or single-chain IL-12(E59A/F60A) variant (SEQ ID NO: 36) was fused to the C′ of one heavy chain of the heterodimeric anti-PD-1 antibody via a G/S containing peptide linker. The constructs are hereinafter referred to as anti-PD-1/IL-12(E59A) (construct #46HC′; heavy chain cytokine fusion polypeptide, heavy chain non-fusion polypeptide SEQ ID NO: 107), anti-PD-1/IL-12(G64A) (construct #47HC′; heavy chain cytokine fusion polypeptide, heavy chain non-fusion polypeptide SEQ ID NO: 107), and anti-PD-1/IL-12(E59A/F60A) (construct #48HC′; heavy chain cytokine fusion polypeptide, heavy chain non-fusion polypeptide SEQ ID NO: 107), respectively.

[0577] IL-12 signal transduction assays using HEK-Blue™ IL-12 and HEK-PD-I-IL-12 (generated in-house by overexpressing human PD-1 in HEK-Blue™ IL-12 Cells using a lentiviral vector) cells were similarly conducted as described in Example 4 with two configurations of immunocytokines described above and rIL-12 (positive control).

TABLE 16
IL-12 biological activity of different IL-12 immunocytokine formats

| | Location of | IL-12 mutation | | HEK-PD-1- |
|---|---|---|---|---|
| Construct | cytokine | (in p40 subunit) | HEK-IL-12 | IL-12 |
| rIL12 (control) | / | / | 100% | 100% |
| IL-12(G64A)/anti-PD-1 | Hinge of | G64A | 90% | 230% |
| (construct #47) | one heavy | | | |
| IL-12(E59A)/anti-PD-1 | chain | E59A | 5% | 78% |
| (construct #46) | | | | |
| IL-12(E59A/F60A)/anti-PD-1 | | E59A/ | <0.2% | 32% |
| (construct #48) | | F60A | | |
| anti-PD-1/IL-12(G64A) | C-terminus | G64A | 85% | 210% |
| (construct #47HC′) | of one | | | |
| anti-PD-1/IL-12(E59A) | heavy chain | E59A | 15% | 86% |
| (construct #46HC′) | | | | |
| anti-PD-1/IL-12(E59A/F60A) | | E59A/ | 4% | 37% |
| (construct #48HC′) | | F60A | | |

[0578] In HEK-IL-12 reporter assay, both IL-12 immunocytokine formats were only able to bind to HEK-IL-12 cells via IL-12 moiety/IL-12 receptor interaction, if the IL-12 moiety was accessible (e.g., heavy chain C′ fusion format). In HEK-PD-1-IL-12 reporter assay, both IL-12 immunocytokine formats were able to bind to HEK-PD-I-IL-12 cells via both IL-12 moiety/IL-12 receptor interaction, and anti-PD-1 antigen-binding fragment/PD-1 interaction.

[0579] As shown in Table 16, the hinge fusion design had significantly decreased non-specific activity (i.e., cytokine activity in the absence of PD-1 binding) compared to the heavy chain C-terminus fusion design. In PD-1 negative cells (HEK-IL-12), construct #48 showed almost undetectable levels of IL-12 activity (≤0.2%), compared to 4% for construct #48HC′. Similar results were observed for construct #47 and construct #47HC′ (5% compared to 15%, respectively). The IL-12 double mutation E59A/F60A also significantly reduced non-specific activity compared to single mutation E59A or G64A. In PD-1 positive cells (HEK-PD-1-IL-12), IL-12 targeted activity was similar between the corresponding hinge fusion format and heavy chain C-terminus fusion format, suggesting that the hinge fusion design does not significantly inhibit IL-12 activity in the presence of antigen-positive cells (or antigen-binding). Taken together, the hinge placement of cytokine (especially certain cytokine variants) can greatly reduce non-specific IL-12 activity in the absence of binding of the antigen-binding domain.

### Example 27: Generation of IL-12/Anti-PD-1 Immunocytokines with Reduced Affinity for PD-1

[0580] Generation of Anti-PD-1 Antibody Variants with Reduced PD-1 Binding Affinity

[0581] Due to nivolumab's high binding affinity for PD-1, IL-12/anti-PD-1 immunocytokines using wildtype nivolumab as parental antibody may direct IL-12 activity to all PD-1 positive cells, regardless of PD-1 expression levels. Activation of such a large population of PD-1 positive cells could result in a cytokine storm or other adverse side effects, from activating any PD-I positive immune cells.

[0582] To generate anti-PD-1 mutants with reduced binding affinity for PD-1, so that it only targets high expressing PD-1 cells (e.g., T cells), mutations were introduced to HC-CDR3 at D100 or N99 positions of nivolumab: HC-CDR3(D100N), HC-CDR3(D100G), HC-CDR3(D100R), HC-CDR3(N99G), HC-CDR3(N99A) and HC-CDR3(N99M). The affinity of these anti-PD-1 antibodies were measured by Biacore and cell-based assays, calibrated by wildtype nivolumab binding affinity (see Table 17). “N/A” indicates non-detected PD-1 binding.

[0583] To construct anti-PD-1 heterodimer, one heavy chain comprises a hinge region comprising SEQ ID NO: 42, and an Fc domain subunit comprising SEQ ID NO: 61; the other heavy chain comprises a hinge region comprising SEQ ID NO: 41, and an Fc domain subunit comprising SEQ ID NO: 62. The two light chains each comprises the amino acid sequence of SEQ ID NO: 106.

TABLE 17
PD-1 binding affinities of various anti-PD-1 heavy chain mutants

| Heavy chain mutation | Affinity to PD-1 (Kd) | |
|---|---|---|
| WT | 2.6 | nM |
| D100N | 25 | nM |
| D100G | 130 | nM |
| D100R | 910 | nM |
| N99G | 2300 | nM |

| | |
|---|---|
| N99A | N/A |
| N99M | N/A |

Construction of IL-12/Anti-PD-1 Immunocytokines with Reduced Affinity for PD-1

[0584] Various IL-12/anti-PD-1 immunocytokines were generated as described in Example 4 by placing single-chain IL-12(E59A/F60A) variant (SEQ ID NO: 36) within the hinge region of one heavy chain of the various anti-PD-1 mutants described above. The sequence of the heavy chain cytokine fusion polypeptide is provided in Table 18 for each construct. The corresponding pairing non-fusion heavy chain comprises from N′ to C′ VH (with corresponding HC-CDR3 mutation) —CH1—hinge (SEQ ID NO: 41)—Fc domain subunit (SEQ ID NO: 62).

### IL-12 Signal Transduction Assay

[0585] IL-12 signal transduction assays were similarly conducted as described in Example 4 using IL-12/anti-PD-1(mut) immunocytokines with reduced PD-1 binding affinity (IL-12(E59A/F60A)/anti-PD-1(wt) and rIL-12 served as control), on HEK-Blue™ IL-12 cells and HEK-PD-1-IL-12 cells. Two variations of HEK-PD-1-IL-12 cells were used: one with high PD-1 expression “HEK-IL-12-PD-1(high)” (as described in Example 4, over-expressing PD-1), and one with 30-fold lower PD-1 expression “HEK-IL-12-PD-1(low)” (generated in-house by expressing lower amount of human PD-1 in HEK-Blue™ IL-12 Cells using a lentiviral vector). Cells were incubated with 20 ng/mL of the various IL-12/anti-PD-1 immunocytokines (or control) for 24 hours.

### IFN-γ Release Assay

[0586] IFN-γ release assays were similarly conducted as described in Example 5 using the IL-12(E59A/F60A)/anti-PD-1(mut) immunocytokines with reduced PD-1 binding affinity. IL-12(E59A/F60A)/anti-PD-1(wt) and rIL-12 served as control. Briefly, T cells were activated by incubating PBMCs with an anti-CD3 antibody (OKT3, 100 ng/mL) for three days. PBMCs were washed to remove the anti-CD3 antibody and incubated with 200 ng/mL of the various IL-12(E59A/F60A)/anti-PD-1(mut) immunocytokines (or control) for 24 hours. After one day, the amount of IFN-γ released into the cell culture medium was measured.

TABLE 18
IL-12 biological activity of IL-12(E59A/F60A)/anti-PD-1 immunocytokines comprising
various anti-PD-1 heavy chain mutations (reduced PD-1 binding affinity)

| | Affinity | | | | | |
|---|---|---|---|---|---|---|
| Construct | PD-1 | | HEK- | HEK-IL-12- | HEK-IL-12- | PBMC |
| (heavy chain fusion sequence) | (Kd) | | IL-12 | PD-1 (high) | PD-1 (low) | (IFN-γ ng/ml) |
| rIL-12 | | | 100% | 100% | 100% | 2300 |
| IL-12(E59A/F60A)/anti-PD-1(WT) | 2.6 | nM | <0.2% | 36% | 38% | 1400 |
| (construct #48; SEQ ID NO: 112) | | | | | | |
| IL-12(E59A/F60A)/anti-PD- | 25 | nM | <0.2% | 38% | 33% | 820 |
| 1(D100N) | | | | | | |
| (SEQ ID NO: 268) | | | | | | |
| IL-12(E59A/F60A)/anti-PD- | 130 | nM | <0.2% | 33% | 17% | 120 |
| 1(D100G) | | | | | | |
| (SEQ ID NO: 269) | | | | | | |
| IL-12(E59A/F60A)/anti-PD- | 910 | nM | <0.2% | 10% | 3% | 69 |
| 1(D100R) | | | | | | |
| (SEQ ID NO: 270) | | | | | | |
| IL-12(E59A/F60A)/anti-PD- | 2300 | nM | <0.2% | 5% | <0.2% | 34 |

| | | | | | |
|---|---|---|---|---|---|
| 1(N99G) | | | | | |
| (SEQ ID NO: 271) | | | | | |
| IL-12(E59A/F60A)/anti-PD- | N/A | <0.2% | 3% | <0.2% | 12 |
| 1(N99A) | | | | | |
| (SEQ ID NO: 272) | | | | | |
| IL-12(E59A/F60A)/anti-PD- | N/A | <0.2% | <0.2% | <0.2% | 13 |
| 1(N99M) | | | | | |
| (SEQ ID NO: 273) | | | | | |

[0587] As can be seen from Table 18, for all immunotyokines tested, no non-specific IL-12 activity was observed in the absence of anti-PD-1 binding (see HEK-IL-12 column). Their ability of transducing IL-12 signal in the presence of PD-1 binding, as well as their ability in inducing IFN-γ release, decreases as anti-PD-1 binding affinity decreases, demonstrating antigen-binding dependent cytokine activity of the hinge fusion design. IL-12(E59A/F60A)/anti-PD-1 immunocytokines with the D100G, D100R, or N99G mutations in anti-PD-1 heavy chain showed notable differences in binding between high and low PD-1 expressing cells. These results indicate that cells expressing a higher level of PD-1 can be specifically targeted using IL-12(E59A/F60A)/anti-PD-1(mut) immunocytokines with reduced affinity for PD-1. IFN-γ secretion induced by these constructs were also much lower compared to the IL-12/anti-PD-1(wt) immunotyokine and rIL-12 control.

[0588] Hence IL-12(E59A/F60A)/anti-PD-1(mut) immunocytokines described herein, and maybe other immunocytokines constructed based on antigen-binding domain with reduced antigen binding affinity, may be used to specifically target cells of interest with high-antigen expression, with reduced off-target effect and/or cytokine storm.

### Example 28: Reducing PD-1 Binding Affinity in IL-12/Anti-PD-1 Immunocytokines Reduces Toxicity in Mice

[0589] Humanized PD-1 mice (by inserting, within the mouse PD-1 locus, a chimeric PD-1 with a human extracellular domain, a murine transmembrane domain and a murine intracellular domain) derived from the C57 strain (5-6 weeks age, 20 g females) were injected with 10 mg/kg or 50 mg/kg (per injection) of various IL-12(E59A/F60A)/anti-PD-1(mut) immunocytokines described in Example 27. IL-12(E59A/F60A)/anti-PD-1(wt) immunocytokine (construct #48) served as control. A total of four injections were given on Days 0, 4, 8, and 12. Mice were monitored daily for mortality and four toxicity symptoms: i) fur texture, ii) reduced activity, iii) morbidity, and iv) weight loss.

[0590] Mice injected with the IL-12(E59A/F60A)/anti-PD-1(wt) immunocytokine comprising wildtype nivolumab showed the greatest toxicity, with all mice in the group dying after receiving either the second or third injection, even for lower dosing. In contrast, mice injected with IL-12(E59A/F60A)/anti-PD-1(mut) immunocytokines comprising anti-PD-1 with reduced PD-1 binding affinity showed reduced toxicity, with death observed only in the group treated with IL-12(E59A/F60A)/anti-PD-1(D100N). As can be seen from Table 19, the severity of toxicity symptom reduces as PD-I binding affinity decreases, and/or as the dose decrease, among the constructs.

TABLE 19
In vivo toxicity of IL-12/anti-PD-1 immunocytokines

| | Affinity | | | | |
|---|---|---|---|---|---|
| | PD-1 | | Dose | | |
| Construct | (Kd) | | (mg/kg) | Toxicity Symptoms | Deaths |
| IL-12(E59A/F60A)/ | 2.6 | nM | 10 | Fur texture, reduced activity, | 5/5 |
| anti-PD-1(WT) | | | | weight loss, morbidity | |
| (construct #48) | | | 50 | Fur texture, reduced activity, | 5/5 |
| | | | | weight loss, morbidity | |
| IL-12(E59A/F60A)/ | 25 | nM | 10 | Fur texture, reduced activity, | 3/5 |
| anti-PD-1(D100N) | | | | weight loss, morbidity | |
| | | | 50 | Fur texture, reduced activity, | 5/5 |
| | | | | weight loss, morbidity | |
| IL-12(E59A/F60A)/ | 130 | nM | 10 | Fur texture, reduced activity | None |
| anti-PD-1(D100G) | | | 50 | Fur texture, reduced activity | None |
| IL-12(E59A/F60A)/ | 910 | nM | 10 | Fur texture (moderate) | None |
| anti-PD-1(D100R) | | | 50 | Fur texture, reduced activity | None |
| IL-12(E59A/F60A)/ | 2300 | nM | 10 | None | None |

| | | | | |
|---|---|---|---|---|
| anti-PD-1(N99G) | | 50 | Fur texture (moderate) | None |
| IL-12(E59A/F60A)/ | N/A | 10 | None | None |
| anti-PD-1(N99M) | | 50 | Fur texture (moderate) | None |

[0591] Due to wildtype nivolumab's high binding affinity to PD-1 (K_{d}˜10⁸-10⁻⁹ M), IL-12(E59/F60A)/anti-PD-1(WT) most likely binds and stimulates (via the cytokine activity) any PD-1 positive cell. This would include activated T-cells and NK cells, which would result in cytokine release syndrome. In contrast, IL-12/anti-PD-1 based immunocytokines with reduced binding affinity to hPD-1 can only bind a smaller population of PD-1 positive cells, particulary cells with very high PD-I expression levels, such as exhausted T-cells. The data shown here is consistent with the data from the in vitro PBMC IFN-γ release assay in Example 27. These findings indicate that reducing the PD-1 binding affinity of anti-PD-1 antigen-binding domain to a Kₐ of between about 10⁻⁶-10⁻⁷ M (see, e.g., D100G, D100R, N99G in anti-PD-1 heavy chain) can greatly improve the safety of IL-12/anti-PD-1 immunocytokines, while retaining therapeutic efficacy.

### Example 29: Increasing the Binding Affinity of PD-L1 and PD-L2 does not Increase Toxicity of IL-12/PD-L1-Fc and IL-12/PD-L2-Fc Immunocytokines

[0592] As shown in Examples 14-17, replacing anti-PD-1 antigen-binding fragment with PD-L2 extracellular domain in IL-12 immunocytokines can significantly reduce toxicity, likely due to stimulated PD-1 inhibitory immune checkpoint signaling upon PD-L2-PD-1 binding, which created an immunosuppression signal that “balances” against the immunostimulating/pro-inflammatory activity of IL-12. To investigate if safety profiles of these “balancing” constructs can be further improved, IL-12 immunocytokines comprising PD-L1 or PD-L2 extracellular domain with increased PD-1 binding affinity were constructed, in order to enhance PD-1 immunosuppression signal.

Generation of PD-L1 Variants with Increased PD-1 Binding Affinity

[0593] Wildtype PD-L1 has a binding affinity for PD-1 of about 10⁵-10⁻⁶ M, which is lower than that of nivolumab(Kd≈10⁻⁸-10⁻⁹ M). To increase the affinity for PD-1, PD-L1 mutants were generated. Mutations were introduced into the extracellular domain of wildtype PD-L1 with amino acid positions relative to SEQ ID NO: 249. These mutant PD-L1 extracellular domains were then fused to an Fc fragment via a hinge region to construct parental PD-L1-Fc constructs. To construct PD-L1-Fc heterodimer, one polypeptide chain comprises a hinge region comprising SEQ ID NO: 52, and an Fc domain subunit comprising SEQ ID NO: 61; the other polypeptide chain comprises a hinge region comprising SEQ ID NO: 51, and an Fc domain subunit comprising SEQ ID NO: 62. Mutation constructs were named in the format of PD-L1(mut)-Fc.

[0594] A description of the mutations made and PD-1 binding affinities (measured in PD-L1-Fc format) are shown in Table 20. Binding affinity for each PD-L1(mut)-Fc was calibrated based on PD-L1(wt)-Fc binding affinity. N/A indicates non-detectable PD-1 binding. These results indicate that all PD-L1(mut) achieved about 4-60 fold increase in PD-1 binding affinity compared to wildtype PD-L1. Among these, PD-L1(I54Q/E58M/R113T/M115L/S117A/G119K) (PD-L1(mut2)), PD-L1(I54Q/E58M/R113T/M115L/G119K) (PD-L1(mut6)), and PD-L1(I54Q/E58M/R113T/M115L/S117A) (PD-L1(mut7)) showed the highest fold increase in affinity for PD-1 as compared to wildtype PD-Li.

TABLE 20
PD-1 binding affinities of various PD-L1 mutants

| | Affinity (Kd) human | | Affinity (Kd) mouse | |
|---|---|---|---|---|
| PD-L1 mutations | PD-1 | | PD-1 | |
| None | 7500 | nM | 5100 | nM |
| (PD-L1(WT); SEQ ID NO: 250) | | | | |
| E58M/R113T/M115L/S117A/G119K | N/A | | N/A | |
| (PD-L1(mut1); SEQ ID NO: 255) | | | | |
| I54Q/E58M/R113T/M115L/S117A/G119K | 150 | nM | 120 | nM |
| (PD-L1(mut2); SEQ ID NO: 256) | | | | |
| I54Q/R113T/M115L/S117A/G119K | 910 | nM | 820 | nM |
| (PD-L1(mut3); SEQ ID NO: 257) | | | | |
| I54Q/E58M/M115L/S117A/G119K | 1090 | nM | 980 | nM |
| (PD-L1(mut4); SEQ ID NO: 258) | | | | |
| I54Q/E58M/R113T/S117A/G119K | 1203 | nM | 1100 | nM |
| (PD-L1(mut5); SEQ ID NO: 259) | | | | |
| I54Q/E58M/R113T/M115L/G119K | 555 | nM | 420 | nM |
| (PD-L1(mut6); SEQ ID NO: 260) | | | | |
| I54Q/E58M/R113T/M115L/S117A | 98 | nM | 110 | nM |
| (PD-L1(mut7); SEQ ID NO: 261) | | | | |

Generation of PD-L2 Variants with Increased PD-1 Binding Affinity

[0595] PD-L2 has a binding affinity for PD-1 of about 10⁻⁶-10⁻⁷ M, which is lower than that of nivolumab(Kd≈10⁻⁸-10⁻⁹ M). To increase the affinity for PD-1, PD-L2 mutants were generated. Mutations were introduced into the extracellular domain of wildtype PD-L2 with amino acid positions relative to SEQ ID NO: 175. These mutant PD-L2 extracellular domains were then fused to an Fc fragment via a hinge region to construct parental PD-L2-Fc constructs. To construct PD-L2-Fc heterodimer, one polypeptide chain comprises a hinge region comprising SEQ ID NO: 52, and an Fc domain subunit comprising SEQ ID NO: 61; the other polypeptide chain comprises a hinge region comprising SEQ ID NO: 51, and an Fc domain subunit comprising SEQ ID NO: 62. Mutation constructs were named in the format of PD-L2(mut)-Fc.

[0596] A description of the mutations made and PD-1 binding affinities (measured in PD-L2-Fc format) are shown in Table 21. Binding affinity for each PD-L2(mut)-Fc was calibrated based on PD-L2(wt)-Fc binding affinity. These results indicate that all PD-L2(mut) achieved about 2-5 fold increase in PD-1 binding affinity compared to wildtype PD-L2. Among these, PD-L2(S58V) (PD-L2(mut2)) and PD-L2(T56V/S58V/Q60L) (PD-L2(mut4)) showed the highest fold increase in affinity for PD-1 as compared to wildtype PD-L2.

TABLE 21
PD-1 binding affinities of various PD-L2 mutants

| | | |
|---|---|---|
| | Affinity (Kd) | Affinity (Kd) |
| PD-L2 Mutations | human PD-1 | mouse PD-1 |

| | | | |
|---|---|---|---|
| None | 1200 | nM | 980 nM |
| (PD-L2(WT); SEQ ID NO: 176) | | | |
| T56V | 520 | nM | 430 nM |
| (PD-L2(mut1); SEQ ID NO: 262) | | | |
| S58V | 350 | nM | 230 nM |
| (PD-L2(mut2); SEQ ID NO: 263) | | | |
| Q60L | 490 | nM | 320 nM |
| (PD-L2(mut3); SEQ ID NO: 264) | | | |
| T56V/S58V/Q60L | 255 | nM | 220 nM |
| (PD-L2(mut4); SEQ ID NO: 265) | | | |

Construction of IL-12/PD-L1-Fc and IL-12/PD-L2-Fc Immunocytokines with Increased Affinity for PD-1

[0597] Similarly as described in Example 15, heterodimeric PD-L1(mut)-Fc or PD-L2(mut)-Fc generated herein were used as parental antigen-binding proteins to construct IL-12 immunocytokines that bind PD-1. Single chain IL-12(E59A/F60A) variant was placed at the N′ of the hinge of one polypeptide chain within the parental PD-L1(mut)-Fc or PD-L2(mut)-Fc heterodimers.

[0598] Briefly, IL-12(E59A/F60A)/PD-L2(wt)-Fc immunocytokine (“construct #29”) comprises one IL-12 fusion polypeptide comprising SEQ ID NO: 186 (from N′ to C′: PD-L2 extracellular domain (SEQ ID NO: 176)—GSG linker (SEQ ID NO: 203)—single chain IL-12(E59A/F60A) variant (SEQ ID NO: 36)—hinge (SEQ ID NO: 52)—Fc domain subunit (SEQ ID NO: 61)); and one pairing polypeptide comprising SEQ ID NO: 185 (from N′ to C′: PD-L2 extracellular domain (SEQ ID NO: 176)—GSG linker—hinge (SEQ ID NO: 51)—Fc domain subunit (SEQ ID NO: 62)). IL-12(E59A/F60A)/PD-L2(mut)-Fc immunocytokine comprises one IL-12 fusion polypeptide (from N′ to C′: PD-L2(mut) extracellular domain—GGGGSGGG linker (SEQ ID NO: 334)—single chain IL-12(E59A/F60A) variant—GGGGSGGG linker (SEQ ID NO: 334)—hinge (SEQ ID NO: 52)—Fc domain subunit (SEQ ID NO: 61)); and one pairing polypeptide (from N′ to C′: PD-L2(mut) extracellular domain—GGGGSGGG linker (SEQ ID NO: 334)—hinge (SEQ ID NO: 51)—Fc domain subunit (SEQ ID NO: 62)).

[0599] IL-12(E59A/F60A)/PD-L1(wt)-Fc immunocytokine comprises one IL-12 fusion polypeptide (from N′ to C′: PD-L1(wt) extracellular domain (SEQ ID NO: 250)—GGGGSGGG linker (SEQ ID NO: 334)—single chain IL-12(E59A/F60A) variant—GGGGSGGG linker (SEQ ID NO: 334)—hinge (SEQ ID NO: 52)—Fc domain subunit (SEQ ID NO: 61)); and one pairing polypeptide (from N′ to C′: PD-L1(wt) extracellular domain (SEQ ID NO: 250)—GGGGSGGG linker (SEQ ID NO: 334)—hinge (SEQ ID NO: 51)—Fc domain subunit (SEQ ID NO: 62)). IL-12(E59A/F60A)/PD-L1(mut)-Fc immunocytokine comprises one IL-12 fusion polypeptide (from N′ to C′: PD-L1(mut) extracellular domain—GGGGSGGG linker (SEQ ID NO: 334)—single chain IL-12(E59A/F60A) variant—GGGGSGGG linker (SEQ ID NO: 334)—hinge (SEQ ID NO: 52)—Fc domain subunit (SEQ ID NO: 61)); and one pairing polypeptide (from N′ to C′: PD-L1(mut) extracellular domain—GGGGSGGG linker (SEQ ID NO: 334)—hinge (SEQ ID NO: 51)—Fc domain subunit (SEQ ID NO: 62)).

[0600] To test the safety profiles of the IL-12 immunocytokines constructed with increased affinity to PD-1, wildtype C57 mice (5-6 weeks age, 20 g females) were injected with 10 mg/kg or 50 mg/kg (per injection) of IL-12(E59A/F60A)/PD-L1(mut2)-Fc imunocytokine or IL-12(E59A/F60A)/PD-L2(mut2)-Fc immunocytokine, as these two constructs showed similar PD-1 binding affinity to both human and mouse PD-1 (˜10⁻⁷ M). IL-12(E59A/F60A)/PD-L1(wt)-Fc imunocytokine or IL-12(E59A/F60A)/PD-L2(wt)-Fc immunocytokine served as control. A total of four injections were given on Days 0, 4, 8, and 12. Mice were monitored daily for mortality and four toxicity symptoms: i) fur texture, ii) reduced activity, iii) morbidity, and iv) weight loss.

[0601] As can be seen from Table 22, increasing binding affinity to PD-1 does not significantly affect the safety profiles of IL-12(E59A/F60A)/PD-L1-Fc immunocytokine or IL-12(E59A/F60A)/PD-L2-Fc immunocytokine. These results show that IL-12 immunocytokines comprising mutant versions of PD-L1 and PD-L2 with increased binding affinities to PD-1 retain the safety profile of wildtype IL-12/PD-L1-Fc and IL-12/PD-L2-Fc immunocytokines. This may be applied to other PD-L1-Fc or PD-L2-Fc based immunocytokines as well, to construct other immunocytokines (e.g., IL-2 immunocytokines).

TABLE 22
In vivo toxicity of IL-12/PD-L2 immunocytokines

| | Affinity | | | |
|---|---|---|---|---|
| Construct | (Kd) | Dose | Toxicity | Deaths |
| (cytokine fusion chain sequence) | mPD-1 | (mg/kg) | Symptoms | in group |
| IL-12(E59A/F60A)/PD-L1(WT)-Fc | 5100 nM | 10 | None | None |
| | | 50 | None | None |
| IL-12(E59A/F60A)/PD-L1 | 120 nM | 10 | None | None |
| (I54Q/E58M/R113T/M115L/S117A/G119K)-Fc | | 50 | Fur texture | None |
| (“IL-12(E59A/F60A)/PD-L1 | | | (moderate) | |
| (mut2)-Fc”; SEQ ID NO: 277) | | | | |
| IL-12(E59A/F60A)/PD-L2(WT)-Fc | 980 nM | 10 | None | None |
| (IL-12(E59A/F60A)/PD-L2(mut2)-Fc; | | 50 | None | None |
| (construct #29; SEQ ID NO: 186) | | 50 | None | None |
| IL-12(E59A/F60A)/PD-L2(S58V)-Fc | 230 nM | 10 | None | None |
| SEQ ID NO: 293 | | | | |

### Example 30: Generation of IL-2/PD-L1 Immunocytokines with IL-2 Biological Activity Directed to PD-1-Positive Cells

[0602] Certain cytokines have synergistic action, such as IL-12 and IL-2, IL-12 and IFN-γ. To reduce toxicity of IL-2 and immunocytokines thereof, two sets of IL-2 mutations were generated: mutations within IL-2 domain that interacts with IL2Ru (CD25) (R38D/K43E/E61R), and mutations within IL-2 domain that interacts with IL2Ry (CD132) (L18R, Q22E, Q126T, S130R, or any combinations thereof). See Table 23.

[0603] Heterodimeric PD-L1(mut2)-Fc was used as the parental PD-1 binding protein. First polypeptide chain comprises SEQ ID NO: 281 (N′ to C′: PD-L1(mut2) extracellular domain (SEQ ID NO: 256)—GGGGSGGG linker (SEQ ID NO: 334)—hinge (SEQ ID NO: 52)—Fc domain subunit (SEQ ID NO: 61)), second polypeptide chain comprises SEQ ID NO: 283 (N′ to C′: PD-L1(mut2) extracellular domain (SEQ ID NO: 256)—GGGGSGGG linker (SEQ ID NO: 334) —hinge (SEQ ID NO: 51)—Fc domain subunit (SEQ ID NO: 62)). To construct IL-2 immunocytokines, IL-2 variant was placed between the PD-L1(mut2) extracellular domain and the hinge. Briefly, IL-2(mut)/PD-L1(mut2)-Fc immunocytokine comprises one IL-2 fusion polypeptide (from N′ to C′: PD-L1(mut2) extracellular domain (SEQ ID NO: 256)—GGGSG linker (SEQ ID NO: 209) —IL-2(mut) variant—GGGGSGGG linker (SEQ ID NO: 334)—hinge (SEQ ID NO: 51)—Fc domain subunit (SEQ ID NO: 62)); and one pairing polypeptide SEQ ID NO: 281.

[0604] HEK-Blue™ IL-2 Cells and HEK-PD-1-IL-2 cells were used to assess IL-2 signal activation activity of the constructs, as described in Examples 1-3. As can be seen from Table 23, IL-2(R38D/K43E/E61R)/PD-L1(mut2)-Fc with IL-2 mutations only in CD25 binding domain (R38D/K43E/E61R) still retained about 16% IL-2 activity based on HEK-IL-2 assay (no PD-1 binding), while IL-2 immunocytokines further carrying IL-2 mutations in the CD132 binding domain significantly decreased IL-2 activity based on HEK-IL-2 assay, in the absence of PD-1 binding. Notably, IL-2 activity of some of the IL-2 immunocytokines further carrying CD132 binding domain mutations (see constructs comprising SEQ ID NO: 285, SEQ ID NO: 286, or SEQ ID NO: 287 chain) can be partialy rescued when binding to PD-1 (based on HEK-IL-2-PD-1 assay). S130 may be crutial for IL-2 activity, as IL-2 immunocytokine further carrying S130R mutation in CD132 binding domain (see construct comprising SEQ ID NO: 288 chain), in combination with other IL-2 mutations, fail to exhibit any IL-2 activity even in the presence of PD-1 binding.

TABLE 23
IL-2 biological activity of IL-2/anti-PD-1 immunocytokines

| | Non-fusion | IL-2 fusion or | | | | | |
|---|---|---|---|---|---|---|---|
| | polypeptide | non-fusion | IL-2 | CD25 | CD132 | | |
| | PD- | polypeptide PD- | SEQ | binding | binding | | HEK- |
| | L1(mut2)-Fc | L1(mut2)-Fc | ID | site | site | HEK- | IL-2- |
| Construct | SEQ ID NO: | SEQ ID NO: | NO: | mutations | mutations | IL-2 | PD-1 |
| rIL2 | / | / | | / | / | 100% | 100% |
| PD-L1(mut2)-Fc | 281 | 283 | / | / | / | <0.1% | <0.1% |
| IL- | 281 | 327 | 2 | R38D/ | / | 16% | 76% |
| 2(R38D/K43E/E61R)/ | | | | K43E/E61R | | | |
| PD-L1(mut2)-Fc | | | | | | | |
| IL- | 281 | 285 | 251 | R38D/ | L18R/Q22E | 4% | 35% |
| 2(L18R/Q22E/R38D/ | | | | K43E/E61R | | | |
| K43E/E61R)/PD-L1(mut2)- | | | | | | | |
| Fc | | | | | | | |
| IL- | 281 | 286 | 252 | R38D/ | Q126T | 2% | 20% |
| 2(R38D/K43E/E61R/ | | | | K43E/E61R | | | |
| Q126T)/PD-L1(mut2)-Fc | | | | | | | |
| IL- | 281 | 287 | 253 | R38D/ | L18R/Q22E/ | <0.1% | 5% |
| 2(L18R/Q22E/R38D/ | | | | K43E/E61R | Q126T | | |
| K43E/E61R/Q126T)/PD- | | | | | | | |
| L1(mut2)-Fc | | | | | | | |
| IL- | 281 | 288 | 254 | R38D/ | L18R/Q22E/ | <0.1% | <0.1% |
| 2(L18R/Q22E/R38D/ | | | | K43E/E61R | Q126T/ | | |
| K43E/E61R/Q126T/S130R)/ | | | | | S130R | | |
| PD-L1(mut2)-Fc | | | | | | | |

### Example 31: Generation of IL-2/IL-12/PD-L1 Immunocytokines with IL-2 and IL-12 Biological Activity Directed to PD-1-Positive Cells

[0605] Certain cytokines have synergistic action, such as IL-12 and IL-2. As shown in Examples above, IL-12(E59A/F60A)/PD-L1-Fc immunocytokine (hinge region) showed PD-1 binding dependent IL-12 activity. To investigate whether immunocytokines can be constructed with synergistic IL-12 and IL-2 activity, while retaining PD-1 binding dependent cytokine activity, different configurations of immunocytokines were constructed. Heterodimeric PD-L1(mut2)-Fc was used as parental PD-1 binding fusion protein (constructed in Example 29). Set I: one polypeptide chain comprises single chain IL-12(E59A/F60A) polypeptide positioned at the hinge region of PD-L1(mut2)-Fc (see SEQ ID NO: 277 constructed in Example 29); the pairing polypeptide chain does not comprise IL-2 moiety (control; SEQ ID NO: 283 constructed in Example 29), or comprises IL-2 variant (either with L18R/Q22E/R38D/K43E/E61R mutation (SEQ ID NO: 251), or with R38D/K43E/E61R/Q126T mutation (SEQ ID NO: 252)) positioned at the hinge region of PD-L1(mut2)-Fc. These immunocytokines are named in the format of IL-2/IL-12(E59A/F60A)/PD-L1(mut2)-Fc. Set II: one polypeptide chain comprises IL-12(E59A/F60A) fused to the C′ of PD-L1(mut2)-Fc via GGGGSGGG linker (see SEQ ID NO: 279); the pairing polypeptide chain does not comprise IL-2 moiety (control; SEQ ID NO: 283 constructed in Example 29), or comprises IL-2 variant (either with L18R/Q22E/R38D/K43E/E61R mutation (SEQ ID NO: 251), or with R38D/K43E/E61R/Q126T mutation (SEQ ID NO: 252)) positioned at the hinge region of PD-L1(mut2)-Fc. These immunocytokines are named in the format of IL-2/PD-L1(mut2)-Fc/IL-12(E59A/F60A), indicating that IL-12 moiety is at the C′ of Fc. See Table 24 for construct sequences.

[0606] HEK-Blue™ IL-2 Cells and HEK-PD-1-IL-2 cells were used to assess IL-2 signal activation activity of the constructs, as described in Examples 1-3. HEK-Blue™ IL-12 Cells and HEK-PD-1-IL-12 cells were used to assess IL-12 signal activation activity of the constructs, as described in Example 4.

[0607] As can be seen from Table 24, IL-12(E59A/F60A)/PD-L1(mut2)-Fc (hinge fusion) did not have detectable IL-12 activity in the absence of PD-1 binding, while PD-1 binding rescued the IL-12 activity to 24%. When IL-12(E59A/F60A) was placed at C′ of Fc as PD-L1(mut2)-Fc/IL-12(E59A/F60A), IL-12 activity was about 10%-2% in the absence of PD-1 binding, and IL-12 activity was further rescued by PD-1 binding (˜25%), to similar extent as the IL-12 hinge fusion.

[0608] By adding on IL-2 in the pairing chain at the hinge region, for both IL-12 hinge fusion and C′ fusion formats, IL-2 activity was about 20-40 in the absence of PD-1 binding, but was rescued to about 200DN35% by PD-1 binding.

[0609] These data indicate that IL-i2 and IL-2 can both retain PD-1-binding dependent activity when constructed in trispecific immunocytokine format. Further, IL-12 and IL-2 moeities did not have significant negative impact on each other's activity.

TABLE 24
IL-2 and IL-12 biological activity of IL-2/IL-12/PD-L1-Fc
immunocytokines and IL-2/PD-L1-Fc/IL-12 immunocytokines

| | | IL-2 fusion or | | | | |
|---|---|---|---|---|---|---|
| | IL-12 fusion | non-fusion | | HEK- | | HEK- |
| | polypeptide | polypeptide | | IL-2- | HEK- | IL-12- |
| Construct | SEQ ID NO: | SEQ ID NO: | HEK-IL-2 | PD-1 | IL-12 | PD-1 |
| rIL-2 | / | / | 100% | 100% | / | / |
| rIL-12 | / | / | / | / | 100% | 100% |
| IL-12(E59A/F60A)/PD- | 277 | 283 (no IL-2) | <0.1% | <0.1% | <0.2% | 24% |
| L1(mut2)-Fc | (IL-12 hinge) | | | | | |
| IL- | 277 | 285 | 4% | 35% | <0.2% | 19% |
| 2(L18R/Q22E/R38D/K43E/ | (IL-12 hinge) | | | | | |
| E61R)/IL-12(E59A/F60A)/PD- | | | | | | |
| L1(mut2)-Fc | | | | | | |
| IL- | 277 | 286 | 2% | 20% | <0.2% | 25% |
| 2(R38D/K43E/E61R/Q126T)/ | (IL-12 hinge) | | | | | |
| IL-12(E59A/F60A)/PD- | | | | | | |
| L1(mut2)-Fc | | | | | | |
| PD-L1(mut2)-Fc/IL- | 279 | 283 (no IL-2) | <0.1% | <0.1% | 1% | 25% |
| 12(E59A/F60A) | (IL-12 at C′) | | | | | |
| IL- | 279 | 285 | 3% | 32% | 2% | 27% |
| 2(L18R/Q22E/R38D/K43E/ | (IL-12 at C′) | | | | | |
| E61R)/PD-L1(mut2)-Fc/IL- | | | | | | |
| 12(E59A/F60A) | | | | | | |
| IL- | 279 | 286 | 3% | 31% | 1% | 30% |
| 2(R38D/K43E/E61R/Q126T)/ | (IL-12 at C′) | | | | | |
| PD-L1(mut2)-Fc/IL- | | | | | | |
| 12(E59A/F60A) | | | | | | |

### Example 32: Placing IL-12 Moiety at the Hinge Region can Greatly Improve Safety Profiles of IL-12/PD-L1-Fc Immunocytokines and IL-2/IL-12/PD-L1-Fc Immunocytokines

[0610] PD-L1(mut2)-Fc constructed in Example 29 was used as parental PD-1 binding fusion protein, as it showed similar PD-1 binding affinity in both human and mice.

[0611] To test safety profiles in vivo, a mouse single-chain IL-12 variant (SEQ ID NO: 330) with E59A/F60A mutations in the p40 subunit and a p35 wildtype subunit was similarly constructed as described herein: from N′ to C′ p40(E59A/F60A)-GGPGGGGSGGGSGGGG linker (SEQ ID NO: 335)-p35(wt) (human IL-12 does not function in mouse). Two sets of IL-12 fusion polypeptides were constructed, similar to Example 31. Set I: one polypeptide chain comprises single chain mIL-12(E59A/F60A) polypeptide positioned at the hinge region of PD-L1(mut2)-Fc (see SEQ ID NO: 328); the pairing polypeptide chain does not comprise IL-2 moiety (control; SEQ ID NO: 283 constructed in Example 29), or comprises IL-2 variant (with R38D/K43E/E61R mutation (SEQ ID NO: 2), L18R/Q22E/R38D/K43E/E61R mutation (SEQ ID NO: 251), or with R38D/K43E/E61R/Q126T mutation (SEQ ID NO: 252)) positioned at the hinge region of PD-L1(mut2)-Fc. These immunocytokines are named in the format of IL-2/IL-12(E59A/F60A)/PD-L1(mut2)-Fc. Set II: one polypeptide chain comprises single-chain mIL-12(E59A/F60A) fused to the C′ of PD-L1(mut2)-Fc via GGGGSGGG linker (see SEQ ID NO: 279); the pairing polypeptide chain does not comprise IL-2 moiety (control; SEQ ID NO: 283 constructed in Example 29), or comprises IL-2 variant (with R38D/K43E/E61R mutation (SEQ ID NO: 2), L18R/Q22E/R38D/K43E/E61R mutation (SEQ ID NO: 251) positioned at the hinge region of PD-L1(mut2)-Fc. These immunocytokines are named in the format of IL-2/PD-L1(mut2)-Fc/IL-12(E59A/F60A), indicating that IL-12 moiety is at the C′ of Fc. See Table 24 for construct sequences. A Control Set did not have any IL-12 moiety fusion to PD-L1(mut2)-Fc (SEQ ID NO: 281).

[0612] To test safety profiles of these constructs, wild-type C57 mice (5-6 weeks age, weight 20 g, female) were injected with PBS (control), or the immunocytokines (10 mg/kg per injection) described herein. A total of 4 injections were given every 4 days. Mice were monitored for death and toxicity symptoms, such as fur texture, reduced activity, and weight loss. 48 hours after the 2^{nd} injection, blood was collected and serum concentrations of IFN-γ was measured.

[0613] As shown in Table 25, immunocytokines comprising IL-2 additional mutations in CD132 binding domain (L18R/Q22E, or Q126T) in addition to R38D/K43E/E61R in CD25 binding domain, showed much greater safety profiles compared to those without CD132 binding domain mutations (see constructs comprising SEQ ID NO: 327 chain), irrespective ofifthe L-12 moiety is at C′ or at hinge.

[0614] Immunocytokines with IL-12 at the C′ of Fc, IL-2(mut)/PD-L1(mut2)-Fc/mTL-12(E59A/F6 pA) showed higher toxicity compared to DL-12 positioned at hinge region (IL-2(mut)/mIL-12(E59A/F6A)/PD-L1(mut2)-Fc). IL-2(mut)/PD-L1(mut2)-Fc/mL-12(E59A/F60A) also induced much higher (20-30 folds) cytokine release (see IFN-γ level) compared to IL-12 hinge fusion design.

[0615] Taken together, our in vivo and in vitro data presented herein suggested that immunocytokines with cytokine (e.g., IL-12 or variant thereof) positioned at the hinge region can significantly improve the safety profile, even when more cytokines with synergistic acttions are present in the same construct (e.g., IL-2/IL-12/PD-L-Fc). Mutations in cytokines to reduce their activities, and/or mutations in antigen-binding domain (e.g., anti-PD-1 or PD-Li, or PD-L2), can further improve safety and/or therapeutic efficacy of the constructs.

TABLE 25
IL-2 and IL-12 biological activity of IL-2/IL-12/PD-L1-Fc
immunocytokines and IL-2/PD-L1-Fc/IL-12 immunocytokines

| | IL-12 fusion or | IL-2 fusion or | | | | | |
|---|---|---|---|---|---|---|---|
| | non-fusion | non-fusion | | | | | |
| | polypeptide SEQ | polypeptide SEQ | Dose | Toxicity | Deaths | Blood | |
| Construct | ID NO: | ID NO: | (mg/kg) | Symptoms | in group | IFN-γ | |
| PBS | / | / | / | None | None | 5 | pg/ml |
| PD-L1(mut2)-Fc | 281 | 283 | 10 mg/kg | None | None | 6 | pg/ml |
| | (no IL-12) | (no IL-2) | | | | | |
| IL- | 281 | 327 | 10 mg/kg | Fur texture, | None | 45 | pg/ml |
| 2(R38D/K43E/E61R)/ | (no IL-12) | | | reduced | | | |
| PD-L1(mut2)-Fc | | | | activity | | | |
| IL- | 281 | 285 | 10 mg/kg | None | None | 32 | pg/ml |
| 2(L18R/Q22E/R38D/ | (no IL-12) | | | | | | |
| K43E/E61R)/PD- | | | | | | | |
| L1(mut2)-Fc | | | | | | | |
| IL- | 281 | 286 | 10 mg/kg | None | None | 24 | pg/ml |
| 2(R38D/K43E/E61R/ | (no IL-12) | | | | | | |
| Q126T)/PD-L1(mut2)-Fc | | | | | | | |
| mIL- | 328 | 283 | 10 mg/kg | None | None | 80 | pg/ml |
| 12(E59A/F60A)/PD- | (mIL-12 at hinge) | (no IL-2) | | | | | |
| L1(mut2)-Fc | | | | | | | |
| IL- | 328 | 327 | 10 mg/kg | Fur texture, | None | 90 | pg/ml |
| 2(R38D/K43E/E61R)/ | (mIL-12 at hinge) | | | reduced | | | |
| mIL- | | | | activity | | | |
| 12(E59A/F60A)/PD- | | | | | | | |
| L1(mut2)-Fc | | | | | | | |
| IL- | 328 | 285 | 10 mg/kg | None | None | 64 | pg/ml |
| 2(L18R/Q22E/R38D/ | (mIL-12 at hinge) | | | | | | |
| K43E/E61R)/mIL- | | | | | | | |
| 12(E59A/F60A)/PD- | | | | | | | |
| L1(mut2)-Fc | | | | | | | |
| IL- | 328 | 286 | 10 mg/kg | None | None | 45 | pg/ml |
| 2(R38D/K43E/E61R/ | (mIL-12 at hinge) | | | | | | |
| Q126T)/mIL- | | | | | | | |
| 12(E59A/F60A)/PD- | | | | | | | |
| L1(mut2)-Fc | | | | | | | |
| PD-L1(mut2)-Fc/mIL- | 329 | 283 | 10 mg/kg | Fur texture | None | 1400 | pg/ml |
| 12(E59A/F60A) | (mIL-12 at C′) | (no IL-2) | | (moderate) | | | |
| IL- | 329 | 327 | 10 mg/kg | Fur texture, | 1/5 | 5600 | pg/ml |
| 2(R38D/K43E/E61R)/ | (mIL-12 at C′) | | | reduced | | | |
| PD-L1(mut2)-Fc/mIL- | | | | activity | | | |
| 12(E59A/F60A) | | | | | | | |
| IL- | 329 | 285 | 10 mg/kg | Fur texture, | None | 1800 | pg/ml |
| 2(L18R/Q22E/R38D/ | (mIL-12 at C′) | | | reduced | | | |
| K43E/E61R)/PD- | | | | activity | | | |
| L1(mut2)-Fc/mIL- | | | | | | | |
| 12(E59A/F60A) | | | | | | | |
| IL- | 329 | 286 | 10 mg/kg | Fur texture | None | 2100 | pg/ml |
| 2(R38D/K43E/E61R/ | (mIL-12 at C′) | | | (moderate) | | | |
| Q126T)/PD-L1(mut2)- | | | | | | | |
| Fc/mIL- | | | | | | | |
| 12(E59A/F60A) | | | | | | | |

SEQUENCE LISTING
(wildtype mature human IL-2)
SEQ ID NO: 1
[sequence omitted]
(IL-2 mutant R38D/K43E/E61R)
SEQ ID NO: 2

[chemical structure]

LAQSKNFHLRPRDLISNINVIVLELKGSETTFMCEYADETATIVEFLNRWITFCQSIISTLT
(wildtype mature human IFN-α2b)
SEQ ID NO: 3
CDLPQTHSLGSRRTLMLLAQMRKISLFSCLKDRHDFGFPQEEFGNQFQKAETIPVLHEMIQQIFNLFSTKDSS
AAWDETLLDKFYTELYQQLNDLEACVIQGVGVTETPLMKEDSILAVRKYFQRITLYLKEKKYSPCAWEVV
RAEIMRSFSLSTNLQESLRSKE
(IFN-α2b mutant L30A)
SEQ ID NO: 4

[chemical structure]

SAAWDETLLDKFYTELYQQLNDLEACVIQGVGVTETPLMKEDSILA VRKYFQRITLYLKEKKYSPCAWEV
VRAEIMRSFSLSTNLQESLRSKE
(IFN-α2b mutant K31A)
SEQ ID NO: 5

[chemical structure]

AAWDETLLDKFYTELYQQLNDLEACVIQGVGVTETPLMKEDSILAVRKYFQRITLYLKEKKYSPCAWEVV
RAEIMRSFSLSTNLQESLRSKE
(IFN-α2b mutant D32A)
SEQ ID NO: 6

[chemical structure]

AAWDETLLDKFYTELYQQLNDLEACVIQGVGVTETPLMKEDSILAVRKYFQRITLYLKEKKYSPCAWEVV
RAEIMRSFSLSTNLQESLRSKE
(IFN-α2b mutant R33A)
SEQ ID NO: 7

[chemical structure]

AAWDETLLDKFYTELYQQLNDLEACVIQGVGVTETPLMKEDSILAVRKYFQRITLYLKEKKYSPCAWEVV
RAEIMRSFSLSTNLQESLRSKE
(IFN-α2b mutant H34A)
SEQ ID NO: 8

[chemical structure]

AAWDETLLDKFYTELYQQLNDLEACVIQGVGVTETPLMKEDSILAVRKYFQRITLYLKEKKYSPCAWEVV
RAEIMRSFSLSTNLQESLRSKE
(IFN-α2b mutant D35A)
SEQ ID NO: 9

[chemical structure]

AAWDETLLDKFYTELYQQLNDLEACVIQGVGVTETPLMKEDSILAVRKYFQRITLYLKEKKYSPCAWEVV
RAEIMRSFSLSTNLQESLRSKE
(wildtype mature human IFN-γ monomer)
SEQ ID NO: 10
QDPYVKEAENLKKYFNAGHSDVADNGTLFLGILKNWKEESDRKIMQSQIVSFYFKLFKNFKDDQSIQKSVE
TIKEDMNVKFFNSNKKKRDDFEKLTNYSVTDLNVQRKAIHELIQVMAELSPAAKTGKRKRSQMLFRG
(IFN-γ mutant S20A/D21A monomer)
SEQ ID NO: 11

[chemical structure]

ETIKEDMNVKFFNSNKKKRDDFEKLTNYSVTDLNVQRKAIHELIQVMAELSPAAKTGKRKRSQMLFRG
(IFN-γ mutant V22A/A23S monomer)
SEQ ID NO: 12

[chemical structure]

TIKEDMNVKFFNSNKKKRDDFEKLTNYSVTDLNVQRKAIHELIQVMAELSPAAKTGKRKRSQMLFRG
(IFN-γ mutant A23V monomer)
SEQ ID NO: 13

[chemical structure]

TIKEDMNVKFFNSNKKKRDDFEKLTNYSVTDLNVQRKAIHELIQVMAELSPAAKTGKRKRSQMLFRG
(IFN-γ mutant D24A/N25A monomer)
SEQ ID NO: 14

[chemical structure]

TIKEDMNVKFFNSNKKKRDDFEKLTNYSVTDLNVQRKAIHELIQVMAELSPAAKTGKRKRSQMLFRG
IFN-γ mutant A23E/D24E/N25K monomer)
SEQ ID NO: 15

[chemical structure]

TIKEDMNVKFFNSNKKKRDDFEKLTNYSVTDLNVQRKAIHELIQVMAELSPAAKTGKRKRSQMLFRG
IFN-γ mutant A23Q monomer)
SEQ ID NO: 16

[chemical structure]

TIKEDMNVKFFNSNKKKRDDFEKLTNYSVTDLNVQRKAIHELIQVMAELSPAAKTGKRKRSQMLFRG
(IFN-γ mutant D21K monomer)
SEQ ID NO: 17

[chemical structure]

TIKEDMNVKFFNSNKKKRDDFEKLTNYSVTDLNVQRKAIHELIQVMAELSPAAKTGKRKRSQMLFRG
(single-chain “wildtype” IFN-γ homodimer; linker is bolded; wildtype IFN-γ monomer is
italicized)
SEQ ID NO: 18
QDPYVKEAENLKKYFNAGHSDVADNGTLFLGILKNWKEESDRKIMQSQIVSFYFKLFKNFKDDQSIQKSVETIKE
DMNVKFFNSNKKKRDDFEKLTNYSVTDLNVORKAIHELIQVMAELSPAAKTGKRKRSOMLFRGFEGGGSGGGG
SGGGGSGGGGSQDPYVKEAENLKKYFNAGHSDVADNGTLFLGILKNWKEESDRKIMQSQIVSFYFKLFKNFKD
DQSIQKSVETIKEDMNVKFFNSNKKKRDDFEKLTNYSVTDLNVQRKAIHELIQVMAELSPAAKTGKRKRSQMLFR
G
(single-chain IFN-γ mutant A23V homodimer; linker is bolded; IFN-γ mutant monomer is
italicized)
SEQ ID NO: 19

[chemical structure]

DMNVKFFNSNKKKRDDFEKLTNYSVTDLNVORKAIHELIQVMAELSPAAKTGKRKRSQMLFRGFEGGGSGGGG

[chemical structure]

DQSIQKSVETIKEDMNVKFFNSNKKKRDDFEKLTNYSVTDLNVORKAIHELIQVMAELSPAAKTGKRKRSQMLFR
G
(wildtype mature human IL-10 monomer)
SEQ ID NO: 20
SPGQGTQSENSCTHFPGNLPNMLRDLRDAFSRVKTFFQMKDQLDNLLLKESLLEDFKGYLGCQALSEMIQF
YLEEVMPQAENQDPDIKAHVNSLGENLKTLRLRLRRCHRFLPCENKSKAVEQVKNAFNKLQEKGIYKAMS
EFDIFINYIEAYMTMKIRN
(IL-10 mutant R24A monomer)
SEQ ID NO: 21

[chemical structure]

YLEEVMPQAENQDPDIKAHVNSLGENLKTLRLRLRRCHRFLPCENKSKAVEQVKNAFNKLQEKGIYKAMS
EFDIFINYIEAYMTMKIRN
(IL-10 mutant D25A/L26A monomer)
SEQ ID NO: 22

[chemical structure]

FYLEEVMPQAENQDPDIKAHVNSLGENLKTLRLRLRRCHRFLPCENKSKAVEQVKNAFNKLQEKGIYKAM
SEFDIFINYIEAYMTMKIRN
(IL-10 mutant R27A monomer)
SEQ ID NO: 23

[chemical structure]

YLEEVMPQAENQDPDIKAHVNSLGENLKTLRLRLRRCHRFLPCENKSKAVEQVKNAFNKLQEKGIYKAMS
EFDIFINYIEAYMTMKIRN
(IL-10 mutant D28A/A29S monomer)
SEQ ID NO: 24

[chemical structure]

YLEEVMPQAENQDPDIKAHVNSLGENLKTLRLRLRRCHRFLPCENKSKAVEQVKNAFNKLQEKGIYKAMS
EFDIFINYIEAYMTMKIRN
(IL-10 mutant F30A/S31A monomer)
SEQ ID NO: 25

[chemical structure]

FYLEEVMPQAENQDPDIKAHVNSLGENLKTLRLRLRRCHRFLPCENKSKAVEQVKNAFNKLQEKGIYKAM
SEFDIFINYIEAYMTMKIRN
(IL-10 mutant R32A monomer)
SEQ ID NO: 26

[chemical structure]

YLEEVMPQAENQDPDIKAHVNSLGENLKTLRLRLRRCHRFLPCENKSKAVEQVKNAFNKLQEKGIYKAMS
EFDIFINYIEAYMTMKIRN
(single-chain “wildtype” IL-10 homodimer; linker is bolded; wildtype IL-10 monomer is
italicized)
SEQ ID NO: 27
SPGQGTQSENSCTHFPGNLPNMLRDLRDAFSRVKTFFQMKDQLDNLLLKESLLEDFKGYLGCQALSEMIQFYLE
EVMPQAENQDPDIKAHVNSLGENLKTLRLRLRRCHRFLPCENKSKAVEQVKNAFNKLOEKGIYKAMSEFDIFINYI
EAYMTMKIRNFEGGGSGGGGSGGGGSGGGGSSPGQGTQSENSCTHFPGNLPNMLRDLRDAFSRVKTFFQMK
DQLDNLLLKESLLEDFKGYLGCQALSEMIQFYLEEVMPQAENQDPDIKAHVNSLGENLKTLRLRLRRCHRFLPCE
NKSKAVEQVKNAFNKLQEKGIYKAMSEFDIFINYIEAYMTMKIRN
(single-chain IL-10 mutant R27A homodimer; linker is bolded; IL-10 mutant monomer is
italicized)
SEQ ID NO: 28

[chemical structure]

EVMPQAENQDPDIKAHVNSLGENLKTLRLRLRRCHRFLPCENKSKAVEQVKNAFNKLQEKGIYKAMSEFDIFINYI

[chemical structure]

KDQLDNLLLKESLLEDFKGYLGCQALSEMIQFYLEEVMPQAENQDPDIKAHVNSLGENLKTLRLRLRRCHRFLPC
ENKSKAVEQVKNAFNKLQEKGIYKAMSEFDIFINYIEAYMTMKIRN
(wildtype mature human IL-12A (p35) subunit)
SEQ ID NO: 29
RNLPVATPDPGMFPCLHHSQNLLRAVSNMLQKARQTLEFYPCTSEEIDHEDITKDKTSTVEACLPLELTKNE
SCLNSRETSFITNGSCLASRKTSFMMALCLSSIYEDLKMYQVEFKTMNAKLLMDPKRQIFLDQNMLAVIDE
LMQALNFNSETVPQKSSLEEPDFYKTKIKLCILLHAFRIRAVTIDRVMSYLNAS
(wildtype mature human IL-12B (p40) subunit)
SEQ ID NO: 30
IWELKKDVYVVELDWYPDAPGEMVVLTCDTPEEDGITWTLDQSSEVLGSGKTLTIQVKEFGDAGQYTCHK
GGEVLSHSLLLLHKKEDGIWSTDILKDQKEPKNKTFLRCEAKNYSGRFTCWWLTTISTDLTFSVKSSRGSSD
PQGVTCGAATLSAERVRGDNKEYEYSVECQEDSACPAAEESLPIEVMVDAVHKLKYENYTSSFFIRDIIKPD
PPKNLQLKPLKNSRQVEVSWEYPDTWSTPHSYFSLTFCVQVQGKSKREKKDRVFTDKTSATVICRKNASIS
VRAQDRYYSSSWSEWASVPCS
(IL-12B (p40) mutant E59A/F60A subunit)
SEQ ID NO: 31

[chemical structure]

KGGEVLSHSLLLLHKKEDGIWSTDILKDQKEPKNKTFLRCEAKNYSGRFTCWWLTTISTDLTFSVKSSRGSS
DPQGVTCGAATLSAERVRGDNKEYEYSVECQEDSACPAAEESLPIEVMVDAVHKLKYENYTSSFFIRDIIKP
DPPKNLQLKPLKNSRQVEVSWEYPDTWSTPHSYFSLTFCVQVQGKSKREKKDRVFTDKTSATVICRKNASI
SVRAQDRYYSSSWSEWASVPCS
(IL-12B (p40) mutant E59A subunit)
SEQ ID NO: 32

[chemical structure]

KGGEVLSHSLLLLHKKEDGIWSTDILKDQKEPKNKTFLRCEAKNYSGRFTCWWLTTISTDLTFSVKSSRGSS
DPQGVTCGAATLSAERVRGDNKEYEYSVECQEDSACPAAEESLPIEVMVDAVHKLKYENYTSSFFIRDIIKP
DPPKNLQLKPLKNSRQVEVSWEYPDTWSTPHSYFSLTFCVQVQGKSKREKKDRVFTDKTSATVICRKNASI
SVRAQDRYYSSSWSEWASVPCS
(IL-12B (p40) mutant F60A subunit)
SEQ ID NO: 33

[chemical structure]

KGGEVLSHSLLLLHKKEDGIWSTDILKDQKEPKNKTFLRCEAKNYSGRFTCWWLTTISTDLTFSVKSSRGSS
DPQGVTCGAATLSAERVRGDNKEYEYSVECQEDSACPAAEESLPIEVMVDAVHKLKYENYTSSFFIRDIIKP
DPPKNLQLKPLKNSRQVEVSWEYPDTWSTPHSYFSLTFCVQVQGKSKREKKDRVFTDKTSATVICRKNASI
SVRAQDRYYSSSWSEWASVPCS
(IL-12B (p40) mutant G64A subunit)
SEQ ID NO: 34

[chemical structure]

KGGEVLSHSLLLLHKKEDGIWSTDILKDQKEPKNKTFLRCEAKNYSGRFTCWWLTTISTDLTFSVKSSRGSS
DPQGVTCGAATLSAERVRGDNKEYEYSVECQEDSACPAAEESLPIEVMVDAVHKLKYENYTSSFFIRDIIKP
DPPKNLQLKPLKNSRQVEVSWEYPDTWSTPHSYFSLTFCVQVQGKSKREKKDRVFTDKTSATVICRKNASI
SVRAQDRYYSSSWSEWASVPCS
(single-chain “wildtype” IL-12 heterodimer IL-12B (wt p40)-linker-IL-12A (wt p35); linker is
bolded)
SEQ ID NO: 35
IWELKKDVYVVELDWYPDAPGEMVVLTCDTPEEDGITWTLDQSSEVLGSGKTLTIQVKEFGDAGQYTCHKGGEV
LSHSLLLLHKKEDGIWSTDILKDOKEPKNKTFLRCEAKNYSGRFTCWWLTTISTDLTFSVKSSRGSSDPQGVTCGA
ATLSAERVRGDNKEYEYSVECOEDSACPAAEESLPIEVMVDAVHKLKYENYTSSFFIRDIIKPDPPKNLOLKPLKNS
RQVEVSWEYPDTWSTPHSYFSLTFCVQVQGKSKREKKDRVFTDKTSATVICRKNASISVRAQDRYYSSSWSEWASV
PCSGGGGSGGGGSGGGGSGGGGSGRNLPVATPDPGMFPCLHHSQNLLRAVSNMLQKARQTLEFYPCTSEEI
DHEDITKDKTSTVEACLPLELTKNESCLNSRETSFITNGSCLASRKTSFMMALCLSSIYEDLKMYQVEFKTMNAKLL
MDPKRQIFLDQNMLAVIDELMQALNFNSETVPQKSSLEEPDFYKTKIKLCILLHAFRIRAVTIDRVMSYLNAS
(single-chain IL-12 mutant heterodimer IL-12B (p40 E59A/F60A)-linker-IL-12A (wt p35);
linker is bolded; IL-12 subunits are italicized)
SEQ ID NO: 36

[chemical structure]

LSHSLLLLHKKEDGIWSTDILKDQKEPKNKTFLRCEAKNYSGRFTCWWLTTISTDLTFSVKSSRGSSDPQGVTCGA
ATLSAERVRGDNKEYEYSVECQEDSACPAAEESLPIEVMVDAVHKLKYENYTSSFFIRDIIKPDPPKNLQLKPLKNS
RQVEVSWEYPDTWSTPHSYFSLTFCVQVQGKSKREKKDRVFTDKTSATVICRKNASISVRAQDRYYSSSWSEWASV
PCSGGGGSGGGGSGGGGSGGGGSGRNLPVATPDPGMFPCLHHSONLLRAVSNMLQKARQTLEFYPCTSEEI
DHEDITKDKTSTVEACLPLELTKNESCLNSRETSFITNGSCLASRKTSFMMALCLSSIYEDLKMYQVEFKTMNAKLL
MDPKRQIFLDQNMLAVIDELMQALNFNSETVPQKSSLEEPDFYKTKIKLCILLHAFRIRAVTIDRVMSYLNAS
(wildtype mature human IL-23A (p19) subunit)
SEQ ID NO: 37
RAVPGGSSPAWTQCQQLSQKLCTLAWSAHPLVGHMDLREEGDEETTNDVPHIQCGDGCDPQGLRDNSQF
CLORIHQGLIFYEKLLGSDIFTGEPSLLPDSPVGQLHASLLGLSQLLQPEGHHWETQQIPSLSPSQPWQRLLL
RFKILRSLQAFVAVAARVFAHGAATLSP
(single-chain “wildtype” IL-23 heterodimer IL-12B (wt p40)-linker-IL-23A (wt p19); linker is
bolded; IL-23 subunits are italicized)
SEQ ID NO: 38
IWELKKDVYVVELDWYPDAPGEMVVLTCDTPEEDGITWTLDQSSEVLGSGKTLTIQVKEFGDAGQYTCHKGGEV
LSHSLLLLHKKEDGIWSTDILKDOKEPKNKTFLRCEAKNYSGRFTCWWLTTISTDLTFSVKSSRGSSDPQGVTCGA
ATLSAERVRGDNKEYEYSVECQEDSACPAAEESLPIEVMVDAVHKLKYENYTSSFFIRDIIKPDPPKNLOLKPLKNS
RQVEVSWEYPDTWSTPHSYFSLTFCVQVQGKSKREKKDRVFTDKTSATVICRKNASISVRAODRYYSSSWSEWASV
PCSGGGGSGGGGSGGGGSGGGGSGRAVPGGSSPAWTQCQQLSQKLCTLAWSAHPLVGHMDLREEGDEETT
NDVPHIQCGDGCDPQGLRDNSQFCLQRIHQGLIFYEKLLGSDIFTGEPSLLPDSPVGQLHASLLGLSQLLQPEGH
HWETQQIPSLSPSQPWQRLLLRFKILRSLQAFVAVAARVFAHGAATLSP
(single-chain IL-23 mutant heterodimer IL-12B (p40 E59A/F60A)-linker-IL-23A (wt p19);
linker is bolded; IL-23 subunits are italicized)
SEQ ID NO: 39

[chemical structure]

LSHSLLLLHKKEDGIWSTDILKDOKEPKNKTFLRCEAKNYSGRFTCWWLTTISTDLTFSVKSSRGSSDPQGVTCGA
ATLSAERVRGDNKEYEYSVECQEDSACPAAEESLPIEVMVDAVHKLKYENYTSSFFIRDIIKPDPPKNLOLKPLKNS
RQVEVSWEYPDTWSTPHSYFSLTFCVQVQGKSKREKKDRVFTDKTSATVICRKNASISVRAQDRYYSSSWSEWASV
PCSGGGGSGGGGSGGGGSGGGGSGRAVPGGSSPAWTQCQQLSQKLCTLAWSAHPLVGHMDLREEGDEETT
NDVPHIQCGDGCDPQGLRDNSQFCLQRIHQGLIFYEKLLGSDIFTGEPSLLPDSPVGQLHASLLGLSQLLOPEGH
HWETQQIPSLSPSQPWQRLLLRFKILRSLQAFVAVAARVFAHGAATLSP
(hinge)
SEQ ID NO: 40
EPKSCDKTHTCPPCPAPELLGGP
(hinge)
SEQ ID NO: 41

[chemical structure]

(hinge)
SEQ ID NO: 42

[chemical structure]

(hinge)
SEQ ID NO: 43

[chemical structure]

(hinge)
SEQ ID NO: 44

[chemical structure]

(hinge)
SEQ ID NO: 45

[chemical structure]

(hinge)
SEQ ID NO: 46
ERKCCVECPPCPAPPVAGP
(hinge)
SEQ ID NO: 47
ESKYGPPCPSCPAPEFLGGP
(hinge, e.g., hinge N′ portion)
SEQ ID NO: 48
EPKSCDK
(hinge, e.g., hinge N' portion)
SEQ ID NO: 49
EPKSC
(hinge, e.g., hinge C' portion)
SEQ ID NO: 50
DKTHTCPPCPAPELLGGP
(hinge, e.g., hinge C' portion)
SEQ ID NO: 51

[chemical structure]

(hinge, e.g., hinge C' portion)
SEQ ID NO: 52

[chemical structure]

(hinge)
SEQ ID NO: 53
DKTHT
(hinge, e.g., hinge N' portion)
SEQ ID NO: 54

[chemical structure]

(hinge)
SEQ ID NO: 55

[chemical structure]

(hinge)
SEQ ID NO: 56

[chemical structure]

(hinge)
SEQ ID NO: 57

[chemical structure]

(hinge)
SEQ ID NO: 58
ESKYGPPCPPCPAPEFLGGP
(hinge)
SEQ ID NO: 59

[chemical structure]

(wildtype human IgG1 Fc)
SEQ ID NO: 60
SVFLFPPKPKDTLMISRTPEVTCVVVDVSHEDPEVKFNWYVDGVEVHNAKTKPREEQYNSTYRVVSVLTV
LHQDWLNGKEYKCKVSNKALPAPIEKTISKAKGQPREPQVYTLPPSRDELTKNQVSLTCL VKGFYPSDIAV
EWESNGQPENNYKTTPPVLDSDGSFFLYSKLTVDKSRWQQGNVFSCSVMHEALHNHYTQKSLSLSPGK
(IgG1 Fc mutant1 T350V/L351Y/S400E/F405A/Y407V)
SEQ ID NO: 61
SVFLFPPKPKDTLMISRTPEVTCVVVDVSHEDPEVKFNWYVDGVEVHNAKTKPREEQYNSTYRVVSVLTV

[chemical structure]

[chemical structure]

(IgG1 Fc mutant2 T350V/T366L/N390R/K392M/T394W)
SEQ ID NO: 62
SVFLFPPKPKDTLMISRTPEVTCVVVDVSHEDPEVKFNWYVDGVEVHNAKTKPREEQYNSTYRVVSVLTV

[chemical structure]

[chemical structure]

(wildtype human IgG4 Fc)
SEQ ID NO: 63
SVFLFPPKPKDTLMISRTPEVTCVVVDVSQEDPEVQFNWYVDGVEVHNAKTKPREEQFNSTYRVVSVLTVL
HQDWLNGKEYKCKVSNKGLPSSIEKTISKAKGQPREPQVYTLPPSQEEMTKNQVSLTCLVKGFYPSDIAVE
WESNGQPENNYKTTPPVLDSDGSFFLYSRLTVDKSRWQEGNVFSCSVMHEALHNHYTQKSLSLSLGK
(IgG1 Fc mutant)
SEQ ID NO: 64

[chemical structure]

LHQDWLNGKEYKCKVSNKALPAPIEKTISKAKGQPREPQVYTLPPSRDELTKNQVSLTCLVKGFYPSDIAV
EWESNGQPENNYKTTPPVLDSDGSFFLYSKLTVDKSRWQQGNVFSCSVMHEALHNHYTQKSLSLSPGK
(IgG1 Fc mutant)
SEQ ID NO: 65

[chemical structure]

[chemical structure]

EWESNGQPENNYKTTPPVLDSDGSFFLYSKLTVDKSRWQQGNVFSCSVMHEALHNHYTQKSLSLSPGK
(IgG1 Fc mutant)
SEQ ID NO: 66
SVFLFPPKPKDTLMISRTPEVTCVVVDVSHEDPEVKFNWYVDGVEVHNAKTKPREEQYNSTYRVVSVLTV

[chemical structure]

EWESNGQPENNYKTTPPVLDSDGSFFLYSKLTVDKSRWQQGNVFSCSVMHEALHNHYTQKSLSLSPGK
(ibalizumab/Trogarzo anti-CD4 Ab HC-CDR1)
SEQ ID NO: 67
GYTFTSYVIH
(ibalizumab/Trogarzo anti-CD4 Ab HC-CDR2)
SEQ ID NO: 68
YNDGTDYDEKFKG
(ibalizumab/Trogarzo anti-CD4 Ab HC-CDR3)
SEQ ID NO: 69
EKDNYATGAWFAY
(ibalizumab/Trogarzo anti-CD4 Ab LC-CDR1)
SEQ ID NO: 70
KSSQSLLYSTNQKNYLA
(ibalizumab/Trogarzo anti-CD4 Ab LC-CDR2)
SEQ ID NO: 71
WASTRES
(ibalizumab/Trogarzo anti-CD4 Ab LC-CDR3)
SEQ ID NO: 72
QQYYSYRT
(ibalizumab/Trogarzo anti-CD4 Ab VH; CDRs are underlined)
SEQ ID NO: 73
QVQLQQSGPEVVKPGASVKMSCKASGYTFTSYVIHWVRQKPGQGLDWIGYINPYNDGTDYDEKFKGKAT
LTSDTSTSTAYMELSSLRSEDTAVYYCAREKDNYATGAWFAYWGQGTLVTVSSAS
(ibalizumab/Trogarzo anti-CD4 Ab VL; CDRs are underlined)
SEQ ID NO: 74
DIVMTQSPDSLAVSLGERVTMNCKSSQSLLYSTNQKNYLAWYQQKPGQSPKLLIYWASTRESGVPDRFSGS
GSGTDFTLTISSVQAEDVAVYYCQQYYSYRTFGGGTKLEIK
(anti-CD4 Ab HC (IgG1 Fc mutant); VH is underlined; hinge is bolded)
SEQ ID NO: 75
QVQLQQSGPEVVKPGASVKMSCKASGYTFTSYVIHWVROKPGQGLDWIGYINPYNDGTDYDEKFKGKAT
LTSDTSTSTAYMELSSLRSEDTAVYYCAREKDNYATGAWFAYWGQGTLVTVSSASTKGPSVFPLAPSSKST
SGGTAALGCLVKDYFPEPVTVSWNSGALTSGVHTFPAVLQSSGLYSLSSVVTVPSSSLGTQTYICNVNHKPS
NTKVDKKVEPKSCDKTHTCPPCPAPELLGGPSVFLFPPKPKDTLMISRTPEVTCVVVDVSHEDPEVKFNW
YVDGVEVHNAKTKPREEQYASTYRVVSVLTVLHQDWLNGKEYKCKVSNKALPAPIEKTISKAKGQPREPQ
VYTLPPSRDELTKNQVSLTCLVKGFYPSDIAVEWESNGQPENNYKTTPPVLDSDGSFFLYSKLTVDKSRWQ
QGNVFSCSVMHEALHNHYTQKSLSLSPGK
(ibalizumab/Trogarzo anti-CD4 Ab HC (IgG4 Fc); VH is underlined; hinge is bolded)
SEQ ID NO: 76
QVQLQQSGPEVVKPGASVKMSCKASGYTFTSYVIHWVROKPGQGLDWIGYINPYNDGTDYDEKFKGKAT
LTSDTSTSTAYMELSSLRSEDTAVYYCAREKDNYATGAWFAYWGQGTLVTVSSASTKGPSVFPLAPCSRST
SESTAALGCLVKDYFPEPVTVSWNSGALTSGVHTFPAVLQSSGLYSLSSVVTVPSSSLGTKTYTCNVDHKPS
NTKVDKRVESKYGPPCPSCPAPEFLGGPSVFLFPPKPKDTLMISRTPEVTCVVVDVSQEDPEVQFNWYVD
GVEVHNAKTKPREEQFNSTYRVVSVLTVLHQDWLNGKEYKCKVSNKGLPSSIEKTISKAKGQPREPQVYT
LPPSQEEMTKNQVSLTCLVKGFYPSDIA VEWESNGQPENNYKTTPPVLDSDGSFFLYSRLTVDKSRWQEGN
VFSCSVMHEALHNHYTQKSLSLSLGK
(ibalizumab/Trogarzo anti-CD4 Ab LC; VL is underlined)
SEQ ID NO: 77
DIVMTQSPDSLAVSLGERVTMNCKSSQSLLYSTNQKNYLAWYQQKPGQSPKLLIYWASTRESGVPDRFSGS
GSGTDFTLTISSVQAEDVAVYYCQQYYSYRTFGGGTKLEIKRTVAAPSVFIFPPSDEQLKSGTASVVCLLNN
FYPREAKVQWKVDNALQSGNSQESVTEQDSKDSTYSLSSTLTLSKADYEKHKVYACEVTHQGLSSPVTKS
FNRGEC
(anti-CD4 Ab HC (IgG1 Fc mutant2); VH is underlined; hinge is bolded)
SEQ ID NO: 78
QVQLQQSGPEVVKPGASVKMSCKASGYTFTSYVIHWVROKPGQGLDWIGYINPYNDGTDYDEKFKGKAT
LTSDTSTSTAYMELSSLRSEDTAVYYCAREKDNYATGAWFAYWGQGTLVTVSSASTKGPSVFPLAPSSKST
SGGTAALGCLVKDYFPEPVTVSWNSGALTSGVHTFPAVLQSSGLYSLSSVVTVPSSSLGTQTYICNVNHKPS

[chemical structure]

WYVDGVEVHNAKTKPREEQYNSTYRVVSVLTVLHQDWLNGKEYKCKVSNKALPAPIEKTISKAKGQPRE

[chemical structure]

RWQQGNVFSCSVMHEALHNHYTQKSLSLSPGK
(anti-CD4 Ab VH-CH1-N' hinge portion-IL-2 mutant R38D/K43E/E61R-C' hinge portion-
SEQ ID NO: 79
IgG1 Fc mutant1; VH is underlined; hinge is bolded; IL-2 mutant is italicized)
QVQLQQSGPEVVKPGASVKMSCKASGYTFTSYVIHWVROKPGQGLDWIGYINPYNDGTDYDEKFKGKAT
LTSDTSTSTAYMELSSLRSEDTAVYYCAREKDNYATGAWFAYWGQGTLVTVSSASTKGPSVFPLAPSSKST
SGGTAALGCLVKDYFPEPVTVSWNSGALTSGVHTFPAVLQSSGLYSLSSVVTVPSSSLGTQTYICNVNHKPS

[chemical structure]

[chemical structure]

[chemical structure]

[chemical structure]

[chemical structure]

HNHYTQKSLSLSPGK
(anti-CD4 Ab VH-CH1-N' hinge portion-linker-IFN-a2b mutant L30A-C' hinge portion-
IgG1 Fc mutant1; VH is underlined; hinge is bolded; linker is bolded and underlined; IFN-a2b mutant is
italicized)
SEQ ID NO: 80
QVQLQQSGPEVVKPGASVKMSCKASGYTFTSYVIHWVRQKPGQGLDWIGYINPYNDGTDYDEKFKGKAT
LTSDTSTSTAYMELSSLRSEDTAVYYCAREKDNYATGAWFAYWGQGTLVTVSSASTKGPSVFPLAPSSKST
SGGTAALGCLVKDYFPEPVTVSWNSGALTSGVHTFPAVLQSSGLYSLSSVVTVPSSSLGTQTYICNVNHKPS

[chemical structure]

KAETIPVLHEMIQQIFNLFSTKDSSAAWDETLLDKFYTELYQQLNDLEACVIQGVGVTETPLMKEDSILAVRKYFQ

[chemical structure]

RTPEVTCVVVDVSHEDPEVKFNWYVDGVEVHNAKTKPREEQYNSTYRVVSVLTVLHQDWLNGKEYKCK

[chemical structure]

[chemical structure]

(anti-CD4 Ab VH-CH1-N' hinge portion-linker-single-chain IFN-γ mutant A23V
homodimer-C' hinge portion-IgG1 Fc mutant1; VH is underlined; hinge is bolded; linker is bolded and
underlined; IFN-γ mutant monomer is italicized)
SEQ ID NO: 81
QVQLQQSGPEVVKPGASVKMSCKASGYTFTSYVIHWVRQKPGQGLDWIGYINPYNDGTDYDEKFKGKAT
LTSDTSTSTAYMELSSLRSEDTAVYYCAREKDNYATGAWFAYWGOGTLVTVSSASTKGPSVFPLAPSSKST
SGGTAALGCLVKDYFPEPVTVSWNSGALTSGVHTFPAVLQSSGLYSLSSVVTVPSSSLGTQTYICNVNHKPS

[chemical structure]

KLFKNFKDDQSIQKSVETIKEDMNVKFFNSNKKKRDDFEKLTNYSVTDLNVORKAIHELIQVMAELSPAAKTGKR

[chemical structure]

DRKIMQSQIVSFYFKLFKNFKDDQSIOKSVETIKEDMNVKFFNSNKKKRDDFEKLTNYSVTDLNVORKAIHELIQV

[chemical structure]

DPEVKFNWYVDGVEVHNAKTKPREEQYNSTYRVVSVLTVLHQDWLNGKEYKCKVSNKALPAPIEKTISK

[chemical structure]

KLTVDKSRWQQGNVFSCSVMHEALHNHYTQKSLSLSPGK
(anti-CD4 Ab VH-CH1-N' hinge portion-linker-single-chain IL-10 mutant R27A homodimer-
C' hinge portion-IgG1 Fc mutant1; VH is underlined; hinge is bolded; linker is bolded and underlined;
IL-10 mutant monomer is italicized)
SEQ ID NO: 82
QVQLQQSGPEVVKPGASVKMSCKASGYTFTSYVIHWVRQKPGQGLDWIGYINPYNDGTDYDEKFKGKAT
LTSDTSTSTAYMELSSLRSEDTAVYYCAREKDNYATGAWFAYWGQGTLVTVSSASTKGPSVFPLAPSSKST
SGGTAALGCLVKDYFPEPVTVSWNSGALTSGVHTFPAVLQSSGLYSLSSVVTVPSSSLGTQTYICNVNHKPS

[chemical structure]

EDFKGYLGCQALSEMIQFYLEEVMPQAENQDPDIKAHVNSLGENLKTLRLRLRRCHRFLPCENKSKAVEQVKNA
FNKLOEKGIYKAMSEFDIFINYIEAYMTMKIRNFEGGGSGGGGSGGGGSGGGGSSPGQGTQSENSCTHFPGNL

[chemical structure]

LGENLKTLRLRLRRCHRFLPCENKSKAVEQVKNAFNKLQEKGIYKAMSEFDIFINYIEAYMTMKIRNDKTHTCPP

[chemical structure]

[chemical structure]

[chemical structure]

QKSLSLSPGK
(anti-CD4 Ab VH-CH1-N' hinge portion-linker-single-chain IL-12 mutant heterodimer IL-
12B (p40 E59A/F60A)-linker-IL-12A (wt p35)-C' hinge portion-IgG1 Fc mutant1; VH is underlined; hinge
is bolded; linker is bolded and underlined; IL-12 subunits are italicized)
SEQ ID NO: 83
QVQLQQSGPEVVKPGASVKMSCKASGYTFTSYVIHWVRQKPGQGLDWIGYINPYNDGTDYDEKFKGKAT
LTSDTSTSTAYMELSSLRSEDTAVYYCAREKDNYATGAWFAYWGQGTLVTVSSASTKGPSVFPLAPSSKST
SGGTAALGCLVKDYFPEPVTVSWNSGALTSGVHTFPAVLQSSGLYSLSSVVTVPSSSLGTQTYICNVNHKPS
NTKVDKKVEPKSCDKPGSGIWELKKDVYVVELDWYPDAPGEMVVLTCDTPEEDGITWTLDQSSEVLGSGKTL

[chemical structure]

DLTFSVKSSRGSSDPOGVTCGAATLSAERVRGDNKEYEYSVECQEDSACPAAEESLPIEVMVDAVHKLKYENYTSS
FFIRDIIKPDPPKNLOLKPLKNSRQVEVSWEYPDTWSTPHSYFSLTFCVQVQGKSKREKKDRVFTDKTSATVICRK
NASISVRAQDRYYSSSWSEWASVPCSGGGGSGGGGSGGGGSGGGGSGRNLPVATPDPGMFPCLHHSQNLLRA
VSNMLQKARQTLEFYPCTSEEIDHEDITKDKTSTVEACLPLELTKNESCLNSRETSFITNGSCLASRKTSFMMALCL
SSIYEDLKMYQVEFKTMNAKLLMDPKRQIFLDQNMLAVIDELMQALNFNSETVPQKSSLEEPDFYKTKIKLCILLH

[chemical structure]

FNWYVDGVEVHNAKTKPREEQYNSTYRVVSVLTVLHQDWLNGKEYKCKVSNKALPAPIEKTISKAKGQP

[chemical structure]

KSRWQQGNVFSCSVMHEALHNHYTQKSLSLSPGK
(anti-CD4 Ab VH-CH1-N' hinge portion-linker-single-chain IL-23 mutant heterodimer IL-
12B (p40 E59A/F60A)-linker-IL-23A (wt p19)-C' hinge portion-IgG1 Fc mutant1; VH is underlined; hinge
is bolded; linker is bolded and underlined; IL-23 subunits are italicized)
SEQ ID NO: 84
QVQLQQSGPEVVKPGASVKMSCKASGYTFTSYVIHWVROKPGQGLDWIGYINPYNDGTDYDEKFKGKAT
LTSDTSTSTAYMELSSLRSEDTAVYYCAREKDNYATGAWFAYWGQGTLVTVSSASTKGPSVFPLAPSSKST
SGGTAALGCLVKDYFPEPVTVSWNSGALTSGVHTFPAVLQSSGLYSLSSVVTVPSSSLGTQTYICNVNHKPS
NTKVDKKVEPKSCDKPGSGIWELKKDVYVVELDWYPDAPGEMVVLTCDTPEEDGITWTLDQSSEVLGSGKTL

[chemical structure]

DLTFSVKSSRGSSDPQGVTCGAATLSAERVRGDNKEYEYSVECQEDSACPAAEESLPIEVMVDAVHKLKYENYTSS
FFIRDIIKPDPPKNLOLKPLKNSRQVEVSWEYPDTWSTPHSYFSLTFCVQVQGKSKREKKDRVFTDKTSATVICRK
NASISVRAQDRYYSSSWSEWASVPCSGGGGSGGGGSGGGGSGGGGSGRAVPGGSSPAWTQCQQLSQKLCTLA
WSAHPLVGHMDLREEGDEETTNDVPHIQCGDGCDPQGLRDNSQFCLQRIHQGLIFYEKLLGSDIFTGEPSLLPD
SPVGOLHASLLGLSQLLQPEGHHWETQQIPSLSPSQPWQRLLLRFKILRSLQAFVAVAARVFAHGAATLSPDKTH

[chemical structure]

[chemical structure]

[chemical structure]

NHYTQKSLSLSPGK
anti-CD3ϵ Ab HC-CDR1)
SEQ ID NO: 85
GFTFSYFWMN
(anti-CD3ϵ Ab HC-CDR2)
SEQ ID NO: 86
EIRLRSDNYATHYAESVKG
(anti-CD3ϵ Ab HC-CDR3)
SEQ ID NO: 87
DWEFTY
(anti-CD3ϵ Ab LC-CDR1)
SEQ ID NO: 88
SASLSVSFMH
(anti-CD3ϵ Ab LC-CDR2)
SEQ ID NO: 89
RTSNLAS
(anti-CD3ϵ Ab LC-CDR3)
SEQ ID NO: 90
QQRSSDPP
(anti-CD3ϵ Ab VH; CDRs are underlined)
SEQ ID NO: 91
EVQLVESGGGLVQPGRSLRLSCTASGFTFSYFWMNWVRQAPGKGLEWVGEIRLRSDNYATHYAESVKGR
FTISRDDSKSIAYLQMNSLKTEDTALYYCTRDWEFTYWGQGTTVTVSSAS
(anti-CD3ϵ Ab VL; CDRs are underlined)
SEQ ID NO: 92
EIVMTQSPGTLSLSPGESATLSCSASLSVSFMHWFQQKPGHAPRLLIYRTSNLASGVPDRFSGSGSGTDFTLT
ISRLEPEDFAVYYCQQRSSDPPTFGQGTRLEI
(anti-CD3ϵ Ab HC (IgG1 Fc mutant); VH is underlined)
SEQ ID NO: 93
EVQLVESGGGLVQPGRSLRLSCTASGFTFSYFWMNWVRQAPGKGLEWVGEIRLRSDNYATHYAESVKGR
FTISRDDSKSIAYLQMNSLKTEDTALYYCTRDWEFTYWGQGTTVTVSSASTKGPSVFPLAPSSKSTSGGTAA
LGCLVKDYFPEPVTVSWNSGALTSGVHTFPAVLQSSGLYSLSSVVTVPSSSLGTQTYICNVNHKPSNTKVD
KKVEPKSCDKTHTCPPCPAPELLGGPSVFLFPPKPKDTLMISRTPEVTCVVVDVSHEDPEVKFNWYVDG
VEVHNAKTKPREEQYASTYRVVSVLTVLHQDWLNGKEYKCKVSNKALPAPIEKTISKAKGQPREPQVYTL
PPSRDELTKNQVSLTCL VKGFYPSDIAVEWESNGQPENNYKTTPPVLDSDGSFFLYSKLTVDKSRWQQGNV
FSCSVMHEALHNHYTQKSLSLSPGK
(anti-CD3ϵ Ab LC; VL is underlined)
SEQ ID NO: 94
EIVMTQSPGTLSLSPGESATLSCSASLSVSFMHWFQQKPGHAPRLLIYRTSNLASGVPDRFSGSGSGTDFTLT
ISRLEPEDFAVYYCQQRSSDPPTFGQGTRLEIKRTVAAPSVFIFPPSDEQLKSGTASVVCLLNNFYPREAKVQ
WKVDNALQSGNSQESVTEQDSKDSTYSLSSTLTLSKADYEKHKVYACEVTHQGLSSPVTKSFNRGEC
(anti-CD3: Ab HC (IgG1 Fc mutant2); VH is underlined; hinge is bolded)
SEQ ID NO: 95
EVQLVESGGGLVQPGRSLRLSCTASGFTFSYFWMNWVRQAPGKGLEWVGEIRLRSDNYATHYAESVKGR
FTISRDDSKSIAYLQMNSLKTEDTALYYCTRDWEFTYWGQGTTVTVSSASTKGPSVFPLAPSSKSTSGGTAA
LGCLVKDYFPEPVTVSWNSGALTSGVHTFPAVLQSSGLYSLSSVVTVPSSSLGTQTYICNVNHKPSNTKVD

[chemical structure]

[chemical structure]

[chemical structure]

NVFSCSVMHEALHNHYTQKSLSLSPGK
(anti-CD3& Ab VH-CH1-N' hinge portion-IL-2 mutant R38D/K43E/E61R-C' hinge portion-
IgG1 Fc mutant1; VH is underlined; hinge is bolded; IL-2 mutant is italicized)
SEQ ID NO: 96
EVQLVESGGGLVQPGRSLRLSCTASGFTFSYFWMNWVRQAPGKGLEWVGEIRLRSDNYATHYAESVKGR
FTISRDDSKSIAYLQMNSLKTEDTALYYCTRDWEFTYWGQGTTVTVSSASTKGPSVFPLAPSSKSTSGGTAA
LGCLVKDYFPEPVTVSWNSGALTSGVHTFPAVLQSSGLYSLSSVVTVPSSSLGTQTYICNVNHKPSNTKVD

[chemical structure]

KPLEEVLNLAOSKNFHLRPRDLISNINVIVLELKGSETTFMCEYADETATIVEFLNRWITFCOSIISTLTDKTHTCPP

[chemical structure]

[chemical structure]

[chemical structure]

QKSLSLSPGK
(anti-CD3ϵ Ab VH-CH1-N' hinge portion-linker-IFN-a2b mutant L30A-C' hinge portion-
IgG1 Fc mutant1; VH is underlined; hinge is bolded; linker is bolded and underlined; IFN-a2b mutant
is italicized)
SEQ ID NO: 97
EVQLVESGGGLVQPGRSLRLSCTASGFTFSYFWMNWVRQAPGKGLEWVGEIRLRSDNYATHYAESVKGR
FTISRDDSKSIAYLQMNSLKTEDTALYYCTRDWEFTYWGQGTTVTVSSASTKGPSVFPLAPSSKSTSGGTAA
LGCLVKDYFPEPVTVSWNSGALTSGVHTFPAVLQSSGLYSLSSVVTVPSSSLGTQTYICNVNHKPSNTKVD

[chemical structure]

VLHEMIQQIFNLFSTKDSSAAWDETLLDKFYTELYQOLNDLEACVIQGVGVTETPLMKEDSILAVRKYFORITLYLK

[chemical structure]

CVVVDVSHEDPEVKFNWYVDGVEVHNAKTKPREEQYNSTYRVVSVLTVLHQDWLNGKEYKCKVSNKAL

[chemical structure]

[chemical structure]

(anti-CD3& Ab VH-CH1-N' hinge portion-linker-single-chain IFN-γ mutant A23V
homodimer-C' hinge portion-IgG1 Fc mutant1; VH is underlined; hinge is bolded; linker is bolded
and underlined; IFN-γ mutant monomer is italicized)
SEQ ID NO: 98
EVQLVESGGGLVQPGRSLRLSCTASGFTFSYFWMNWVRQAPGKGLEWVGEIRLRSDNYATHYAESVKGR
FTISRDDSKSIAYLQMNSLKTEDTALYYCTRDWEFTYWGQGTTVTVSSASTKGPSVFPLAPSSKSTSGGTAA
LGCLVKDYFPEPVTVSWNSGALTSGVHTFPAVLQSSGLYSLSSVVTVPSSSLGTQTYICNVNHKPSNTKVD

[chemical structure]

FKDDQSIQKSVETIKEDMNVKFFNSNKKKRDDFEKLTNYSVTDLNVORKAIHELIQVMAELSPAAKTGKRKRSQM

[chemical structure]

SQIVSFYFKLFKNFKDDQSIQKSVETIKEDMNVKFFNSNKKKRDDFEKLTNYSVTDLNVORKAIHELIQVMAELSP

[chemical structure]

NWYVDGVEVHNAKTKPREEQYNSTYRVVSVLTVLHQDWLNGKEYKCKVSNKALPAPIEKTISKAKGQPR

[chemical structure]

SRWQQGNVFSCSVMHEALHNHYTQKSLSLSPGK
(anti-CD3ϵ Ab VH-CH1-N' hinge portion-linker-single-chain IL-10 mutant R27A
homodimer-C' hinge portion-IgG1 Fc mutant1; VH is underlined; hinge is bolded; linker is bolded
and underlined; IL-10 mutant monomer is italicized)
SEQ ID NO: 99
EVQLVESGGGLVQPGRSLRLSCTASGFTFSYFWMNWVRQAPGKGLEWVGEIRLRSDNYATHYAESVKGR
FTISRDDSKSIAYLQMNSLKTEDTALYYCTRDWEFTYWGQGTTVTVSSASTKGPSVFPLAPSSKSTSGGTAA
LGCLVKDYFPEPVTVSWNSGALTSGVHTFPAVLQSSGLYSLSSVVTVPSSSLGTQTYICNVNHKPSNTKVD

[chemical structure]

YLGCQALSEMIQFYLEEVMPQAENQDPDIKAHVNSLGENLKTLRLRLRRCHRFLPCENKSKAVEQVKNAFNKLQ
EKGIYKAMSEFDIFINYIEAYMTMKIRNFEGGGSGGGGSGGGGSGGGGSSPGQGTQSENSCTHFPGNLPNML

[chemical structure]

LKTLRLRLRRCHRFLPCENKSKAVEQVKNAFNKLOEKGIYKAMSEFDIFINYIEAYMTMKIRNDKTHTCPPCPAP

[chemical structure]

[chemical structure]

[chemical structure]

SLSPGK
(anti-CD3& Ab VH-CH1-N' hinge portion-linker-single-chain IL-12 mutant heterodimer IL-
12B (p40 E59A/F60A)-linker-IL-12A (wt p35)-C' hinge portion-IgG1 Fc mutant1; VH is underlined;
hinge is bolded; linker is bolded and underlined; IL-12 subunits are italicized)
SEQ ID NO: 100
EVQLVESGGGLVQPGRSLRLSCTASGFTFSYFWMNWVRQAPGKGLEWVGEIRLRSDNYATHYAESVKGR
FTISRDDSKSIAYLQMNSLKTEDTALYYCTRDWEFTYWGQGTTVTVSSASTKGPSVFPLAPSSKSTSGGTAA
LGCLVKDYFPEPVTVSWNSGALTSGVHTFPAVLQSSGLYSLSSVVTVPSSSLGTQTYICNVNHKPSNTKVD

[chemical structure]

KSSRGSSDPQGVTCGAATLSAERVRGDNKEYEYSVECQEDSACPAAEESLPIEVMVDAVHKLKYENYTSSFFIRDII
KPDPPKNLOLKPLKNSROVEVSWEYPDTWSTPHSYFSLTFCVQVQGKSKREKKDRVFTDKTSATVICRKNASISVR
AQDRYYSSSWSEWASVPCSGGGGSGGGGSGGGGSGGGGSGRNLPVATPDPGMFPCLHHSONLLRAVSNMLQ
KARQTLEFYPCTSEEIDHEDITKDKTSTVEACLPLELTKNESCLNSRETSFITNGSCLASRKTSFMMALCLSSIYEDL
KMYQVEFKTMNAKLLMDPKRQIFLDQNMLAVIDELMQALNFNSETVPQKSSLEEPDFYKTKIKLCILLHAFRIRA

[chemical structure]

VDGVEVHNAKTKPREEQYNSTYRVVSVLTVLHQDWLNGKEYKCKVSNKALPAPIEKTISKAKGQPREPQV

[chemical structure]

QGNVFSCSVMHEALHNHYTQKSLSLSPGK
(anti-CDϵ Ab VH-CH1-N' hinge portion-linker-single-chain IL-23 mutant heterodimer IL-
12B (p40 E59A/F60A)-linker-IL-23A (wt p19)-C' hinge portion-IgG1 Fc mutant1; VH is underlined;
hinge is bolded; linker is bolded and underlined; IL-23 subunits are italicized)
SEQ ID NO: 101
EVQLVESGGGLVQPGRSLRLSCTASGFTFSYFWMNWVRQAPGKGLEWVGEIRLRSDNYATHYAESVKGR
FTISRDDSKSIAYLQMNSLKTEDTALYYCTRDWEFTYWGQGTTVTVSSASTKGPSVFPLAPSSKSTSGGTAA
LGCLVKDYFPEPVTVSWNSGALTSGVHTFPAVLQSSGLYSLSSVVTVPSSSLGTQTYICNVNHKPSNTKVD

[chemical structure]

[chemical structure]

KSSRGSSDPQGVTCGAATLSAERVRGDNKEYEYSVECQEDSACPAAEESLPIEVMVDAVHKLKYENYTSSFFIRDII
KPDPPKNLQLKPLKNSRQVEVSWEYPDTWSTPHSYFSLTFCVQVQGKSKREKKDRVFTDKTSATVICRKNASISVR
AQDRYYSSSWSEWASVPCSGGGGSGGGGSGGGGSGGGGSGRAVPGGSSPAWTQCQQLSQKLCTLAWSAHPL
VGHMDLREEGDEETTNDVPHIQCGDGCDPQGLRDNSQFCLQRIHQGLIFYEKLLGSDIFTGEPSLLPDSPVGQL
HASLLGLSQLLQPEGHHWETQQIPSLSPSQPWQRLLLRFKILRSLQAFVAVAARVFAHGAATLSPDKTHTCPPCP

[chemical structure]

[chemical structure]

[chemical structure]

SLSLSPGK
(nivolumab/Opdivo anti-PD-1 Ab VH)
SEQ ID NO: 102
QVQLVESGGGVVQPGRSLRLDCKASGITFSNSGMHWVRQAPGKGLEWVAVIWYDGSKRYYADSVKGRF
TISRDNSKNTLFLQMNSLRAEDTAVYYCATNDDYWGQGTLVTVSSAS
(nivolumab/Opdivo anti-PD-1 Ab VL)
SEQ ID NO: 103
EIVLTQSPATLSLSPGERATLSCRASQSVSSYLAWYQQKPGQAPRLLIYDASNRATGIPARFSGSGSGTDFTL
TISSLEPEDFAVYYCQQSSNWPRTFGQGTKVEI
(anti-PD-1 Ab HC (IgG1 Fc mutant); VH is underlined)
SEQ ID NO: 104
QVQLVESGGGVVQPGRSLRLDCKASGITFSNSGMHWVRQAPGKGLEWVAVIWYDGSKRYYADSVKGRF
TISRDNSKNTLFLQMNSLRAEDTAVYYCATNDDYWGQGTLVTVSSASTKGPSVFPLAPSSKSTSGGTAALG
CLVKDYFPEPVTVSWNSGALTSGVHTFPAVLQSSGLYSLSSVVTVPSSSLGTQTYICNVNHKPSNTKVDKK
VEPKSCDKTHTCPPCPAPELLGGPSVFLFPPKPKDTLMISRTPEVTCVVVDVSHEDPEVKFNWYVDGVEV
HNAKTKPREEQYASTYRVVSVLTVLHQDWLNGKEYKCKVSNKALPAPIEKTISKAKGQPREPQVYTLPPSR
DELTKNQVSLTCLVKGFYPSDIA VEWESNGQPENNYKTTPPVLDSDGSFFLYSKLTVDKSRWQQGNVFSCS
VMHEALHNHYTQKSLSLSPGK
(nivolumab/Opdivo anti-PD-1 Ab HC; VH is underlined; hinge is bolded)
SEQ ID NO: 105
QVQLVESGGGVVQPGRSLRLDCKASGITFSNSGMHWVRQAPGKGLEWVAVIWYDGSKRYYADSVKGRF
TISRDNSKNTLFLQMNSLRAEDTAVYYCATNDDYWGQGTLVTVSSASTKGPSVFPLAPCSRSTSESTAALG
CLVKDYFPEPVTVSWNSGALTSGVHTFPAVLQSSGLYSLSSVVTVPSSSLGTKTYTCNVDHKPSNTKVDKR
VESKYGPPCPPCPAPEFLGGPSVFLFPPKPKDTLMISRTPEVTCVVVDVSQEDPEVQFNWYVDGVEVHNA
KTKPREEQFNSTYRVVSVLTVLHQDWLNGKEYKCKVSNKGLPSSIEKTISKAKGQPREPQVYTLPPSQEEM
TKNQVSLTCLVKGFYPSDIA VEWESNGQPENNYKTTPPVLDSDGSFFLYSRLTVDKSRWQEGNVFSCSVM
HEALHNHYTQKSLSLSLGK
(nivolumab/Opdivo anti-PD-1 Ab LC; VL is underlined)
SEQ ID NO: 106
EIVLTQSPATLSLSPGERATLSCRASQSVSSYLAWYQQKPGQAPRLLIYDASNRATGIPARFSGSGSGTDFTL
TISSLEPEDFAVYYCQQSSNWPRTFGQGTKVEIKRTVAAPSVFIFPPSDEQLKSGTASVVCLLNNFYPREAKV
QWKVDNALQSGNSQESVTEQDSKDSTYSLSSTLTLSKADYEKHKVYACEVTHQGLSSPVTKSFNRGEC
(anti-PD-1 Ab HC (IgG1 Fc mutant2); VH is underlined; hinge is bolded)
SEQ ID NO: 107
QVQLVESGGGVVQPGRSLRLDCKASGITFSNSGMHWVRQAPGKGLEWVAVIWYDGSKRYYADSVKGRF
TISRDNSKNTLFLQMNSLRAEDTAVYYCATNDDYWGQGTLVTVSSASTKGPSVFPLAPSSKSTSGGTAALG
CLVKDYFPEPVTVSWNSGALTSGVHTFPAVLQSSGLYSLSSVVTVPSSSLGTQTYICNVNHKPSNTKVDKK

[chemical structure]

[chemical structure]

[chemical structure]

FSCSVMHEALHNHYTQKSLSLSPGK
(anti-PD-1 Ab VH-CH1-N' hinge portion-IL-2 mutant R38D/K43E/E61R-C' hinge portion-
IgG1 Fc mutant1; VH is underlined; hinge is bolded; IL-2 mutant is italicized)
SEQ ID NO: 108
QVQLVESGGGVVQPGRSLRLDCKASGITFSNSGMHWVRQAPGKGLEWVAVIWYDGSKRYYADSVKGRF
TISRDNSKNTLFLQMNSLRAEDTAVYYCATNDDYWGQGTLVTVSSASTKGPSVFPLAPSSKSTSGGTAALG
CLVKDYFPEPVTVSWNSGALTSGVHTFPAVLQSSGLYSLSSVVTVPSSSLGTQTYICNVNHKPSNTKVDKK

[chemical structure]

LEEVLNLAQSKNFHLRPRDLISNINVIVLELKGSETTFMCEYADETATIVEFLNRWITFCOSIISTLTDKTHTCPPCP

[chemical structure]

[chemical structure]

[chemical structure]

SLSLSPGK
(anti-PD-1 Ab VH-CH1-N' hinge portion-linker-IFN-a2b mutant L30A-C' hinge portion-
IgG1 Fc mutant1; VH is underlined; hinge is bolded; linker is bolded and underlined; IFN-2b
mutant is italicized)
SEQ ID NO: 109
QVQLVESGGGVVQPGRSLRLDCKASGITFSNSGMHWVRQAPGKGLEWVAVIWYDGSKRYYADSVKGRF
TISRDNSKNTLFLQMNSLRAEDTAVYYCATNDDYWGQGTLVTVSSASTKGPSVFPLAPSSKSTSGGTAALG
CLVKDYFPEPVTVSWNSGALTSGVHTFPAVLQSSGLYSLSSVVTVPSSSLGTQTYICNVNHKPSNTKVDKK

[chemical structure]

HEMIQQIFNLFSTKDSSAAWDETLLDKFYTELYQQLNDLEACVIQGVGVTETPLMKEDSILAVRKYFQRITLYLKE

[chemical structure]

VVVDVSHEDPEVKFNWYVDGVEVHNAKTKPREEQYNSTYRVVSVLTVLHQDWLNGKEYKCKVSNKALP

[chemical structure]

[chemical structure]

(anti-PD-1 Ab VH-CH1-N' hinge portion-linker-single-chain IFN-γ mutant A23V
homodimer-C' hinge portion-IgG1 Fc mutant1; VH is underlined; hinge is bolded; linker is
bolded and underlined; IFN-γ mutant monomer is italicized)
SEQ ID NO: 110
QVQLVESGGGVVQPGRSLRLDCKASGITFSNSGMHWVRQAPGKGLEWVAVIWYDGSKRYYADSVKGRF
TISRDNSKNTLFLQMNSLRAEDTAVYYCATNDDYWGQGTLVTVSSASTKGPSVFPLAPSSKSTSGGTAALG
CLVKDYFPEPVTVSWNSGALTSGVHTFPAVLQSSGLYSLSSVVTVPSSSLGTQTYICNVNHKPSNTKVDKK

[chemical structure]

DDQSIQKSVETIKEDMNVKFFNSNKKKRDDFEKLTNYSVTDLNVORKAIHELIQVMAELSPAAKTGKRKRSQMLF

[chemical structure]

IVSFYFKLFKNFKDDOSIQKSVETIKEDMNVKFFNSNKKKRDDFEKLTNYSVTDLNVORKAIHELIQVMAELSPAA

[chemical structure]

WYVDGVEVHNAKTKPREEQYNSTYRVVSVLTVLHQDWLNGKEYKCKVSNKALPAPIEKTISKAKGQPRE

[chemical structure]

RWQQGNVFSCSVMHEALHNHYTQKSLSLSPGK
(anti-PD-1 Ab VH-CH1-N' hinge portion-linker-single-chain IL-10 mutant R27A
homodimer-C' hinge portion-IgG1 Fc mutant1; VH is underlined; hinge is bolded; linker is
bolded and underlined; IL-10 mutant monomer is italicized)
SEQ ID NO: 111
QVQLVESGGGVVQPGRSLRLDCKASGITFSNSGMHWVRQAPGKGLEWVAVIWYDGSKRYYADSVKGRF
TISRDNSKNTLFLQMNSLRAEDTAVYYCATNDDYWGQGTLVTVSSASTKGPSVFPLAPSSKSTSGGTAALG
CLVKDYFPEPVTVSWNSGALTSGVHTFPAVLQSSGLYSLSSVVTVPSSSLGTQTYICNVNHKPSNTKVDKK

[chemical structure]

GCQALSEMIQFYLEEVMPQAENQDPDIKAHVNSLGENLKTLRLRLRRCHRFLPCENKSKAVEQVKNAFNKLQEK
GIYKAMSEFDIFINYIEAYMTMKIRNFEGGGSGGGGSGGGGSGGGGSSPGQGTQSENSCTHFPGNLPNMLRD

[chemical structure]

TLRLRLRRCHRFLPCENKSKAVEQVKNAFNKLQEKGIYKAMSEFDIFINYIEAYMTMKIRNDKTHTCPPCPAPE

[chemical structure]

[chemical structure]

[chemical structure]

LSPGK
(anti-PD-1 Ab VH-CH1-N' hinge portion-linker-single-chain IL-12 mutant heterodimer IL-
12B (p40 E59A/F60A)-linker-IL-12A (wt p35)-C' hinge portion-IgG1 Fc mutant1; VH is underlined;
hinge is bolded; linker is bolded and underlined; IL-12 subunits are italicized)
SEQ ID NO: 112
QVQLVESGGGVVQPGRSLRLDCKASGITFSNSGMHWVRQAPGKGLEWVAVIWYDGSKRYYADSVKGRF
TISRDNSKNTLFLQMNSLRAEDTAVYYCATNDDYWGQGTLVTVSSASTKGPSVFPLAPSSKSTSGGTAALG
CLVKDYFPEPVTVSWNSGALTSGVHTFPAVLQSSGLYSLSSVVTVPSSSLGTQTYICNVNHKPSNTKVDKK

[chemical structure]

DAGQYTCHKGGEVLSHSLLLLHKKEDGIWSTDILKDQKEPKNKTFLRCEAKNYSGRFTCWWLTTISTDLTFSVKSS
RGSSDPQGVTCGAATLSAERVRGDNKEYEYSVECQEDSACPAAEESLPIEVMVDAVHKLKYENYTSSFFIRDIIKPD
PPKNLQLKPLKNSRQVEVSWEYPDTWSTPHSYFSLTFCVQVQGKSKREKKDRVFTDKTSATVICRKNASISVRAQD
RYYSSSWSEWASVPCSGGGGSGGGGSGGGGSGGGGSGRNLPVATPDPGMFPCLHHSONLLRAVSNMLQKAR
QTLEFYPCTSEEIDHEDITKDKTSTVEACLPLELTKNESCLNSRETSFITNGSCLASRKTSFMMALCLSSIYEDLKMY
QVEFKTMNAKLLMDPKRQIFLDQNMLAVIDELMQALNFNSETVPQKSSLEEPDFYKTKIKLCILLHAFRIRAVTID

[chemical structure]

[chemical structure]

[chemical structure]

NVFSCSVMHEALHNHYTQKSLSLSPGK
(anti-PD-1 Ab VH-CH1-N' hinge portion-linker-single-chain IL-23 mutant heterodimer IL-
12B (p40 E59A/F60A)-linker-IL-23A (wt p19)-C' hinge portion-IgG1 Fc mutant1; VH is underlined;
hinge is bolded; linker is bolded and underlined; IL-23 subunits are italicized)
SEQ ID NO: 113
QVQLVESGGGVVQPGRSLRLDCKASGITFSNSGMHWVRQAPGKGLEWVAVIWYDGSKRYYADSVKGRF
TISRDNSKNTLFLQMNSLRAEDTAVYYCATNDDYWGQGTLVTVSSASTKGPSVFPLAPSSKSTSGGTAALG
CLVKDYFPEPVTVSWNSGALTSGVHTFPAVLQSSGLYSLSSVVTVPSSSLGTQTYICNVNHKPSNTKVDKK

[chemical structure]

DAGQYTCHKGGEVLSHSLLLLHKKEDGIWSTDILKDOKEPKNKTFLRCEAKNYSGRFTCWWLTTISTDLTFSVKSS
RGSSDPQGVTCGAATLSAERVRGDNKEYEYSVECQEDSACPAAEESLPIEVMVDAVHKLKYENYTSSFFIRDIIKPD
PPKNLQLKPLKNSRQVEVSWEYPDTWSTPHSYFSLTFCVQVQGKSKREKKDRVFTDKTSATVICRKNASISVRAQD
RYYSSSWSEWASVPCSGGGGSGGGGSGGGGSGGGGSGRAVPGGSSPAWTQCQQLSQKLCTLAWSAHPLVGH
MDLREEGDEETTNDVPHIQCGDGCDPQGLRDNSQFCLORIHQGLIFYEKLLGSDIFTGEPSLLPDSPVGQLHASL
LGLSQLLQPEGHHWETQQIPSLSPSQPWQRLLLRFKILRSLQAFVAVAARVFAHGAATLSPDKTHTCPPCPAPE

[chemical structure]

[chemical structure]

[chemical structure]

LSPGK
(G10-1 anti-CD8 Ab VH)
SEQ ID NO: 114
EVQLQQSGPELVKPGASVKMSCKASGYTFTDYYMKWVKQSHGKSLEWIGHINPNNDDTFYTQKFKGRAT
LTVDKSSSTAYMQLNSLTSEDSAVYYCVRDDYDGGWFAYWGQGTL VTVSSAS
(G10-1 anti-CD8 Ab VL)
SEQ ID NO: 115
DIQMTQTTSSLSASLGDRVTISCRASQDINNYLNWYQQKSDGTIKLLIYYTSRSYSGVPSRFSGSGSGTDYSL
TISNRRQEDIATYFCQQGKTLPWTFGGGTKLEI
(anti-CD8 Ab HC (IgG1 Fc mutant); VH is underlined; hinge is bolded)
SEQ ID NO: 116
EVQLQQSGPELVKPGASVKMSCKASGYTFTDYYMKWVKQSHGKSLEWIGHINPNNDDTFYTQKFKGRAT
LTVDKSSSTAYMQLNSLTSEDSAVYYCVRDDYDGGWFAYWGQGTLVTVSSASTKGPSVFPLAPSSKSTSG
GTAALGCLVKDYFPEPVTVSWNSGALTSGVHTFPAVLQSSGLYSLSSVVTVPSSSLGTQTYICNVNHKPSNT
KVDKKVEPKSCDKTHTCPPCPAPELLGGPSVFLFPPKPKDTLMISRTPEVTCVVVDVSHEDPEVKFNWY
VDGVEVHNAKTKPREEQYASTYRVVSVLTVLHQDWLNGKEYKCKVSNKALPAPIEKTISKAKGQPREPQV
YTLPPSRDELTKNQVSLTCLVKGFYPSDIA VEWESNGQPENNYKTTPPVLDSDGSFFLYSKLTVDKSRWQQ
GNVFSCSVMHEALHNHYTQKSLSLSPGK
(G10-1 anti-CD8 Ab LC; VL is underlined)
SEQ ID NO: 117
DIQMTOTTSSLSASLGDRVTISCRASQDINNYLNWYQQKSDGTIKLLIYYTSRSYSGVPSRFSGSGSGTDYSL
TISNRRQEDIATYFCQQGKTLPWTFGGGTKLEIKRTVAAPSVFIFPPSDEQLKSGTASVVCLLNNFYPREAKV
QWKVDNALQSGNSQESVTEQDSKDSTYSLSSTLTLSKADYEKHKVYACEVTHQGLSSPVTKSFNRGEC
(anti-CD8 Ab HC (IgG1 Fc mutant2); VH is underlined; hinge is bolded)
SEQ ID NO: 118
EVQLQQSGPELVKPGASVKMSCKASGYTFTDYYMKWVKQSHGKSLEWIGHINPNNDDTFYTQKFKGRAT
LTVDKSSSTAYMQLNSLTSEDSAVYYCVRDDYDGGWFAYWGQGTLVTVSSASTKGPSVFPLAPSSKSTSG
GTAALGCLVKDYFPEPVTVSWNSGALTSGVHTFPAVLQSSGLYSLSSVVTVPSSSLGTQTYICNVNHKPSNT

[chemical structure]

VDGVEVHNAKTKPREEQYNSTYRVVSVLTVLHQDWLNGKEYKCKVSNKALPAPIEKTISKAKGQPREPQV

[chemical structure]

QQGNVFSCSVMHEALHNHYTQKSLSLSPGK
(anti-CD8 Ab VH-CH1-N' hinge portion-IL-2 mutant R38D/K43E/E61R-C' hinge portion-
IgG1 Fc mutant1; VH is underlined; hinge is bolded; IL-2 mutant is italicized)
SEQ ID NO: 119
EVQLQQSGPELVKPGASVKMSCKASGYTFTDYYMKWVKQSHGKSLEWIGHINPNNDDTFYTQKFKGRAT
LTVDKSSSTAYMQLNSLTSEDSAVYYCVRDDYDGGWFAYWGQGTLVTVSSASTKGPSVFPLAPSSKSTSG
GTAALGCLVKDYFPEPVTVSWNSGALTSGVHTFPAVLQSSGLYSLSSVVTVPSSSLGTQTYICNVNHKPSNT

[chemical structure]

[chemical structure]

[chemical structure]

[chemical structure]

[chemical structure]

NHYTQKSLSLSPGK
(anti-CD8 Ab VH-CH1-N' hinge portion-linker-IFN-a2b mutant L30A-C' hinge portion-
IgG1 Fc mutant1; VH is underlined; hinge is bolded; linker is bolded and underlined; IFN-α2b
mutant is italicized)
SEQ ID NO: 120
EVQLQQSGPELVKPGASVKMSCKASGYTFTDYYMKWVKQSHGKSLEWIGHINPNNDDTFYTQKFKGRAT
LTVDKSSSTAYMOLNSLTSEDSAVYYCVRDDYDGGWFAYWGQGTLVTVSSASTKGPSVFPLAPSSKSTSG
GTAALGCLVKDYFPEPVTVSWNSGALTSGVHTFPAVLQSSGLYSLSSVVTVPSSSLGTQTYICNVNHKPSNT

[chemical structure]

ETIPVLHEMIQQIFNLFSTKDSSAAWDETLLDKFYTELYQQLNDLEACVIQGVGVTETPLMKEDSILAVRKYFQRIT

[chemical structure]

PEVTCVVVDVSHEDPEVKFNWYVDGVEVHNAKTKPREEQYNSTYRVVSVLTVLHQDWLNGKEYKCKVS

[chemical structure]

[chemical structure]

(anti-CD8 Ab VH-CH1-N' hinge portion-linker-single-chain IFN-γ mutant A23V
homodimer-C' hinge portion-IgG1 Fc mutant1; VH is underlined; hinge is bolded; linker is bolded
and underlined; IFN-γ mutant monomer is italicized)
SEQ ID NO: 121
EVQLQQSGPELVKPGASVKMSCKASGYTFTDYYMKWVKOSHGKSLEWIGHINPNNDDTFYTOKFKGRAT
LTVDKSSSTAYMOLNSLTSEDSAVYYCVRDDYDGGWFAYWGQGTLVTVSSASTKGPSVFPLAPSSKSTSG
GTAALGCLVKDYFPEPVTVSWNSGALTSGVHTFPAVLQSSGLYSLSSVVTVPSSSLGTQTYICNVNHKPSNT

[chemical structure]

FKNFKDDQSIQKSVETIKEDMNVKFFNSNKKKRDDFEKLTNYSVTDLNVQRKAIHELIOVMAELSPAAKTGKRKR

[chemical structure]

KIMQSQIVSFYFKLFKNFKDDQSIQKSVETIKEDMNVKFFNSNKKKRDDFEKLTNYSVTDLNVORKAIHELIQVMA

[chemical structure]

VKFNWYVDGVEVHNAKTKPREEQYNSTYRVVSVLTVLHQDWLNGKEYKCKVSNKALPAPIEKTISKAKG

[chemical structure]

VDKSRWQQGNVFSCSVMHEALHNHYTQKSLSLSPGK
(anti-CD8 Ab VH-CH1-N' hinge portion-linker-single-chain IL-10 mutant R27A
homodimer-C' hinge portion-IgG1 Fc mutant1; VH is underlined; hinge is bolded; linker is bolded
and underlined; IL-10 mutant monomer is italicized)
SEQ ID NO: 122
EVQLQQSGPELVKPGASVKMSCKASGYTFTDYYMKWVKQSHGKSLEWIGHINPNNDDTFYTQKFKGRAT
LTVDKSSSTAYMOLNSLTSEDSAVYYCVRDDYDGGWFAYWGQGTLVTVSSASTKGPSVFPLAPSSKSTSG
GTAALGCLVKDYFPEPVTVSWNSGALTSGVHTFPAVLQSSGLYSLSSVVTVPSSSLGTQTYICNVNHKPSNT

[chemical structure]

FKGYLGCQALSEMIQFYLEEVMPQAENQDPDIKAHVNSLGENLKTLRLRLRRCHRFLPCENKSKAVEQVKNAFN
KLQEKGIYKAMSEFDIFINYIEAYMTMKIRNFEGGGSGGGGSGGGGSGGGGSSPGQGTQSENSCTHFPGNLPN

[chemical structure]

ENLKTLRLRLRRCHRFLPCENKSKAVEQVKNAFNKLOEKGIYKAMSEFDIFINYIEAYMTMKIRNDKTHTCPPCP

[chemical structure]

[chemical structure]

[chemical structure]

SLSLSPGK
(anti-CD8 Ab VH-CH1-N' hinge portion-linker-single-chain IL-12 mutant heterodimer IL-
12B (p40 E59A/F60A)-linker-IL-12A (wt p35)-C' hinge portion-IgG1 Fc mutant1; VH is underlined;
hinge is bolded; linker is bolded and underlined; IL-12 subunits are italicized)
SEQ ID NO: 123
EVQLQQSGPELVKPGASVKMSCKASGYTFTDYYMKWVKQSHGKSLEWIGHINPNNDDTFYTQKFKGRAT
LTVDKSSSTAYMQLNSLTSEDSAVYYCVRDDYDGGWFAYWGQGTLVTVSSASTKGPSVFPLAPSSKSTSG
GTAALGCLVKDYFPEPVTVSWNSGALTSGVHTFPAVLQSSGLYSLSSVVTVPSSSLGTQTYICNVNHKPSNT
KVDKKVEPKSCDKPGSGIWELKKDVYVVELDWYPDAPGEMVVLTCDTPEEDGITWTLDQSSEVLGSGKTLTIQ

[chemical structure]

FSVKSSRGSSDPQGVTCGAATLSAERVRGDNKEYEYSVECQEDSACPAAEESLPIEVMVDAVHKLKYENYTSSFFIR
DIIKPDPPKNLOLKPLKNSROVEVSWEYPDTWSTPHSYFSLTFCVQVQGKSKREKKDRVFTDKTSATVICRKNASIS
VRAQDRYYSSSWSEWASVPCSGGGGSGGGGSGGGGSGGGGSGRNLPVATPDPGMFPCLHHSQNLLRAVSNM
LQKARQTLEFYPCTSEEIDHEDITKDKTSTVEACLPLELTKNESCLNSRETSFITNGSCLASRKTSFMMALCLSSIYE
DLKMYQVEFKTMNAKLLMDPKRQIFLDQNMLAVIDELMQALNFNSETVPQKSSLEEPDFYKTKIKLCILLHAFRI

[chemical structure]

YVDGVEVHNAKTKPREEQYNSTYRVVSVLTVLHQDWLNGKEYKCKVSNKALPAPIEKTISKAKGQPREPQ

[chemical structure]

QQGNVFSCSVMHEALHNHYTQKSLSLSPGK
(anti-CD8 Ab VH-CH1-N' hinge portion-linker-single-chain IL-23 mutant heterodimer IL-
12B (p40 E59A/F60A)-linker-IL-23A (wt p19)-C' hinge portion-IgG1 Fc mutant1; VH is underlined;
hinge is bolded; linker is bolded and underlined; IL-23 subunits are italicized)
SEQ ID NO: 124
EVQLQQSGPELVKPGASVKMSCKASGYTFTDYYMKWVKQSHGKSLEWIGHINPNNDDTFYTQKFKGRAT
LTVDKSSSTAYMQLNSLTSEDSAVYYCVRDDYDGGWFAYWGQGTLVTVSSASTKGPSVFPLAPSSKSTSG
GTAALGCLVKDYFPEPVTVSWNSGALTSGVHTFPAVLQSSGLYSLSSVVTVPSSSLGTQTYICNVNHKPSNT
KVDKKVEPKSCDKPGSGIWELKKDVYVVELDWYPDAPGEMVVLTCDTPEEDGITWTLDQSSEVLGSGKTLTIQ

[chemical structure]

FSVKSSRGSSDPQGVTCGAATLSAERVRGDNKEYEYSVECQEDSACPAAEESLPIEVMVDAVHKLKYENYTSSFFIR
DIIKPDPPKNLQLKPLKNSRQVEVSWEYPDTWSTPHSYFSLTFCVQVQGKSKREKKDRVFTDKTSATVICRKNASIS
VRAQDRYYSSSWSEWASVPCSGGGGSGGGGSGGGGSGGGGSGRAVPGGSSPAWTQCQQLSQKLCTLAWSAH
PLVGHMDLREEGDEETTNDVPHIQCGDGCDPQGLRDNSQFCLORIHQGLIFYEKLLGSDIFTGEPSLLPDSPVG
QLHASLLGLSQLLQPEGHHWETQQIPSLSPSQPWQRLLLRFKILRSLQAFVAVAARVFAHGAATLSPDKTHTCPP

[chemical structure]

[chemical structure]

[chemical structure]

QKSLSLSPGK
(anti-CTLA-4 Ab VH)
SEQ ID NO: 125
QVQLVESGGGVVQPGRSLRLSCAASGFTFSSYTMHWVRQAPGKGLEWVTFISYDGNNKYYADSVKGRFTI
SRDNSKNTLYLQMNSLRAEDTAIYYCARTGWLGPFDYWGQGTLVTVSSAS
(ipilimumab/Yervoy anti-CTLA-4 Ab VL)
SEQ ID NO: 126
EIVLTQSPGTLSLSPGERATLSCRASQSVGSSYLAWYQQKPGQAPRLLIYGAFSRATGIPDRFSGSGSGTDFT
LTISRLEPEDFAVYYCQQYGSSPWTFGQGTKVEI
(anti-CTLA-4 Ab HC (IgG1 Fc mutant); VH is underlined; hinge is bolded)
SEQ ID NO: 127
QVQLVESGGGVVQPGRSLRLSCAASGFTFSSYTMHWVRQAPGKGLEWVTFISYDGNNKYYADSVKGRFTI
SRDNSKNTLYLQMNSLRAEDTAIYYCARTGWLGPFDYWGQGTLVTVSSASTKGPSVFPLAPSSKSTSGGTA
ALGCLVKDYFPEPVTVSWNSGALTSGVHTFPAVLQSSGLYSLSSVVTVPSSSLGTQTYICNVNHKPSNTKV
DKKVEPKSCDKTHTCPPCPAPELLGGPSVFLFPPKPKDTLMISRTPEVTCVVVDVSHEDPEVKFNWYVD
GVEVHNAKTKPREEQYASTYRVVSVLTVLHQDWLNGKEYKCKVSNKALPAPIEKTISKAKGQPREPQVYT
LPPSRDELTKNQVSLTCLVKGFYPSDIAVEWESNGQPENNYKTTPPVLDSDGSFFLYSKLTVDKSRWQQGN
VFSCSVMHEALHNHYTQKSLSLSPGK
(ipilimumab/Yervoy anti-CTLA-4 Ab HC; VH is underlined; hinge is bolded)
SEQ ID NO: 128
QVQLVESGGGVVQPGRSLRLSCAASGFTFSSYTMHWVRQAPGKGLEWVTFISYDGNNKYYADSVKGRFTI
SRDNSKNTLYLQMNSLRAEDTAIYYCARTGWLGPFDYWGQGTLVTVSSASTKGPSVFPLAPSSKSTSGGTA
ALGCLVKDYFPEPVTVSWNSGALTSGVHTFPAVLQSSGLYSLSSVVTVPSSSLGTQTYICNVNHKPSNTKV
DKRVEPKSCDKTHTCPPCPAPELLGGPSVFLFPPKPKDTLMISRTPEVTCVVVDVSHEDPEVKFNWYVDG
VEVHNAKTKPREEQYNSTYRVVSVLTVLHQDWLNGKEYKCKVSNKALPAPIEKTISKAKGQPREPQVYTL
PPSRDELTKNQVSLTCLVKGFYPSDIAVEWESNGQPENNYKTTPPVLDSDGSFFLYSKLTVDKSRWQQGNV
FSCSVMHEALHNHYTQKSLSLSPGK
(ipilimumab/Yervoy anti-CTLA-4 Ab LC; VL is underlined)
SEQ ID NO: 129
EIVLTQSPGTLSLSPGERATLSCRASQSVGSSYLAWYQQKPGQAPRLLIYGAFSRATGIPDRFSGSGSGTDFT
LTISRLEPEDFAVYYCQQYGSSPWTFGQGTKVEIKRTVAAPSVFIFPPSDEQLKSGTASVVCLLNNFYPREA
KVQWKVDNALQSGNSQESVTEQDSKDSTYSLSSTLTLSKADYEKHKVYACEVTHQGLSSPVTKSFNRGEC
(anti-CTLA-4 Ab HC (IgG1 Fc mutant2); VH is underlined; hinge is bolded)
SEQ ID NO: 130
QVQLVESGGGVVQPGRSLRLSCAASGFTFSSYTMHWVRQAPGKGLEWVTFISYDGNNKYYADSVKGRFTI
SRDNSKNTLYLQMNSLRAEDTAIYYCARTGWLGPFDYWGQGTLVTVSSASTKGPSVFPLAPSSKSTSGGTA
ALGCLVKDYFPEPVTVSWNSGALTSGVHTFPAVLQSSGLYSLSSVVTVPSSSLGTQTYICNVNHKPSNTKV

[chemical structure]

GVEVHNAKTKPREEQYNSTYRVVSVLTVLHQDWLNGKEYKCKVSNKALPAPIEKTISKAKGQPREPQVY

[chemical structure]

QGNVFSCSVMHEALHNHYTQKSLSLSPGK
(anti-CTLA-4 Ab VH-CH1-N' hinge portion-IL-2 mutant R38D/K43E/E61R-C' hinge
portion-IgG1 Fc mutant1; VH is underlined; hinge is bolded; IL-2 mutant is italicized)
SEQ ID NO: 131
QVQLVESGGGVVQPGRSLRLSCAASGFTFSSYTMHWVRQAPGKGLEWVTFISYDGNNKYYADSVKGRFTI
SRDNSKNTLYLQMNSLRAEDTAIYYCARTGWLGPFDYWGQGTLVTVSSASTKGPSVFPLAPSSKSTSGGTA
ALGCLVKDYFPEPVTVSWNSGALTSGVHTFPAVLQSSGLYSLSSVVTVPSSSLGTQTYICNVNHKPSNTKV

[chemical structure]

ELKPLEEVLNLAQSKNFHLRPRDLISNINVIVLELKGSETTFMCEYADETATIVEFLNRWITFCQSIISTLTDKTHTC

[chemical structure]

[chemical structure]

[chemical structure]

YTQKSLSLSPGK
(anti-CTLA-4 Ab VH-CH1-N' hinge portion-linker-IFN-a2b mutant L30A-C' hinge
portion-IgG1 Fc mutant1; VH is underlined; hinge is bolded; linker is bolded and underlined;
IFN-α2b mutant is italicized)
SEQ ID NO: 132
QVQLVESGGGVVQPGRSLRLSCAASGFTFSSYTMHWVRQAPGKGLEWVTFISYDGNNKYYADSVKGRFTI
SRDNSKNTLYLQMNSLRAEDTAIYYCARTGWLGPFDYWGQGTLVTVSSASTKGPSVFPLAPSSKSTSGGTA
ALGCLVKDYFPEPVTVSWNSGALTSGVHTFPAVLQSSGLYSLSSVVTVPSSSLGTQTYICNVNHKPSNTKV

[chemical structure]

PVLHEMIQQIFNLFSTKDSSAAWDETLLDKFYTELYQQLNDLEACVIQGVGVTETPLMKEDSILAVRKYFQRITLYL

[chemical structure]

TCVVVDVSHEDPEVKFNWYVDGVEVHNAKTKPREEQYNSTYRVVSVLTVLHQDWLNGKEYKCKVSNKA

[chemical structure]

[chemical structure]

(anti-CTLA-4 Ab VH-CH1-N' hinge portion-linker-single-chain IFN-γ mutant A23V
homodimer-C' hinge portion-IgG1 Fc mutant1; VH is underlined; hinge is bolded; linker is bolded
and underlined; IFN-γ mutant monomer is italicized)
SEQ ID NO: 133
QVQLVESGGGVVQPGRSLRLSCAASGFTFSSYTMHWVRQAPGKGLEWVTFISYDGNNKYYADSVKGRFTI
SRDNSKNTLYLQMNSLRAEDTAIYYCARTGWLGPFDYWGQGTLVTVSSASTKGPSVFPLAPSSKSTSGGTA
ALGCLVKDYFPEPVTVSWNSGALTSGVHTFPAVLQSSGLYSLSSVVTVPSSSLGTQTYICNVNHKPSNTKV

[chemical structure]

NFKDDQSIQKSVETIKEDMNVKFFNSNKKKRDDFEKLTNYSVTDLNVORKAIHELIQVMAELSPAAKTGKRKRSQ

[chemical structure]

MQSQIVSFYFKLFKNFKDDQSIQKSVETIKEDMNVKFFNSNKKKRDDFEKLTNYSVTDLNVQRKAIHELIQVMAE

[chemical structure]

VKFNWYVDGVEVHNAKTKPREEQYNSTYRVVSVLTVLHQDWLNGKEYKCKVSNKALPAPIEKTISKAKG

[chemical structure]

VDKSRWQQGNVFSCSVMHEALHNHYTQKSLSLSPGK
(anti-CTLA-4 Ab VH-CH1-N' hinge portion-linker-single-chain IL-10 mutant R27A
homodimer-C' hinge portion-IgG1 Fc mutant1; VH is underlined; hinge is bolded; linker is
bolded and underlined; IL-10 mutant monomer is italicized)
SEQ ID NO: 134
QVQLVESGGGVVQPGRSLRLSCAASGFTFSSYTMHWVRQAPGKGLEWVTFISYDGNNKYYADSVKGRFTI
SRDNSKNTLYLQMNSLRAEDTAIYYCARTGWLGPFDYWGQGTLVTVSSASTKGPSVFPLAPSSKSTSGGTA
ALGCLVKDYFPEPVTVSWNSGALTSGVHTFPAVLQSSGLYSLSSVVTVPSSSLGTQTYICNVNHKPSNTKV

[chemical structure]

GYLGCQALSEMIOFYLEEVMPQAENODPDIKAHVNSLGENLKTLRLRLRRCHRFLPCENKSKAVEQVKNAFNKL
QEKGIYKAMSEFDIFINYIEAYMTMKIRNFEGGGSGGGGSGGGGSGGGGSSPGQGTQSENSCTHFPGNLPNM

[chemical structure]

NLKTLRLRLRRCHRFLPCENKSKAVEQVKNAFNKLQEKGIYKAMSEFDIFINYIEAYMTMKIRNDKTHTCPPCPA

[chemical structure]

[chemical structure]

[chemical structure]

LSLSPGK
(anti-CTLA-4 Ab VH-CH1-N' hinge portion-linker-single-chain IL-12 mutant heterodimer
IL-12B (p40 E59A/F60A)-linker-IL-12A (wt p35)-C' hinge portion-IgG1 Fc mutant1; VH is
underlined; hinge is bolded; linker is bolded and underlined; IL-12 subunits are italicized)
SEQ ID NO: 135
QVQLVESGGGVVQPGRSLRLSCAASGFTFSSYTMHWVRQAPGKGLEWVTFISYDGNNKYYADSVKGRFTI
SRDNSKNTLYLQMNSLRAEDTAIYYCARTGWLGPFDYWGQGTLVTVSSASTKGPSVFPLAPSSKSTSGGTA
ALGCLVKDYFPEPVTVSWNSGALTSGVHTFPAVLQSSGLYSLSSVVTVPSSSLGTQTYICNVNHKPSNTKV
DKKVEPKSCDKPGSGIWELKKDVYVVELDWYPDAPGEMVVLTCDTPEEDGITWTLDQSSEVLGSGKTLTIQVK

[chemical structure]

VKSSRGSSDPQGVTCGAATLSAERVRGDNKEYEYSVECQEDSACPAAEESLPIEVMVDAVHKLKYENYTSSFFIRDI
IKPDPPKNLQLKPLKNSRQVEVSWEYPDTWSTPHSYFSLTFCVQVQGKSKREKKDRVFTDKTSATVICRKNASISV
RAQDRYYSSSWSEWASVPCSGGGGSGGGGSGGGGSGGGGSGRNLPVATPDPGMFPCLHHSQNLLRAVSNML
QKARQTLEFYPCTSEEIDHEDITKDKTSTVEACLPLELTKNESCLNSRETSFITNGSCLASRKTSFMMALCLSSIYED
LKMYQVEFKTMNAKLLMDPKRQIFLDQNMLAVIDELMQALNFNSETVPQKSSLEEPDFYKTKIKLCILLHAFRIRA

[chemical structure]

VDGVEVHNAKTKPREEQYNSTYRVVSVLTVLHQDWLNGKEYKCKVSNKALPAPIEKTISKAKGQPREPQV

[chemical structure]

QGNVFSCSVMHEALHNHYTQKSLSLSPGK
(anti-CTLA-4 Ab VH-CH1-N' hinge portion-linker-single-chain IL-23 mutant heterodimer
IL-12B (p40 E59A/F60A)-linker-IL-23A (wt p19)-C' hinge portion-IgG1 Fc mutant1; VH is
underlined; hinge is bolded; linker is bolded and underlined; IL-23 subunits are italicized)
SEQ ID NO: 136
QVQLVESGGGVVQPGRSLRLSCAASGFTFSSYTMHWVRQAPGKGLEWVTFISYDGNNKYYADSVKGRFTI
SRDNSKNTLYLQMNSLRAEDTAIYYCARTGWLGPFDYWGQGTLVTVSSASTKGPSVFPLAPSSKSTSGGTA
ALGCLVKDYFPEPVTVSWNSGALTSGVHTFPAVLQSSGLYSLSSVVTVPSSSLGTQTYICNVNHKPSNTKV
DKKVEPKSCDKPGSGIWELKKDVYVVELDWYPDAPGEMVVLTCDTPEEDGITWTLDQSSEVLGSGKTLTIQVK

[chemical structure]

VKSSRGSSDPQGVTCGAATLSAERVRGDNKEYEYSVECQEDSACPAAEESLPIEVMVDAVHKLKYENYTSSFFIRDI
IKPDPPKNLOLKPLKNSROVEVSWEYPDTWSTPHSYFSLTFCVQVQGKSKREKKDRVFTDKTSATVICRKNASISV
RAQDRYYSSSWSEWASVPCSGGGGSGGGGSGGGGSGGGGSGRAVPGGSSPAWTQCQQLSQKLCTLAWSAHP
LVGHMDLREEGDEETTNDVPHIQCGDGCDPQGLRDNSQFCLQRIHQGLIFYEKLLGSDIFTGEPSLLPDSPVGQ
LHASLLGLSQLLQPEGHHWETQQIPSLSPSQPWQRLLLRFKILRSLQAFVAVAARVFAHGAATLSPDKTHTCPPC

[chemical structure]

[chemical structure]

[chemical structure]

KSLSLSPGK
(anti-PD-L1 Ab HC-CDR1)
SEQ ID NO: 243
DSWIH
(anti-PD-L1 Ab HC-CDR2)
SEQ ID NO: 244
WISPYGGSSY
(anti-PD-L1 Ab HC-CDR3)
SEQ ID NO: 245
RHWPGGF
(anti-PD-L1 Ab LC-CDR1)
SEQ ID NO: 246
VTTAVA
(anti-PD-L1 Ab LC-CDR2)
SEQ ID NO: 247
SASFPY
(anti-PD-L1 Ab LC-CDR3)
SEQ ID NO: 248
QQYMYHPST
(anti-PD-L1 Ab VH; CDRs are underlined)
SEQ ID NO: 137
EVQLVESGGGLVQPGGSLRLSCAASYFPFSDSWIHWVRQAPGKGLEWVAWISPYGGSSYYADSVQDRFTIS
ADTSKNTAYLQMNSLRAEDTAVYYCAKRHWPGGFDHWGQGTLVTVSSAS
(anti-PD-L1 Ab VL; CDRs are underlined)
SEQ ID NO: 138
DIQMTQSPSSLSASVGDRVTITCSASQDVTTAVAWYQQKPGKAPKLLIYSASFPYRGVPSRFSGSGSGTDFT
LTISSLQPEDFATYYCQQYMYHPSTFGQGTKVEI
(anti-PD-L1 Ab HC (IgG1 Fc mutant); VH is underlined; hinge is bolded)
SEQ ID NO: 139
EVQLVESGGGLVQPGGSLRLSCAASYFPFSDSWIHWVRQAPGKGLEWVAWISPYGGSSYYADSVQDRFTIS
ADTSKNTAYLQMNSLRAEDTAVYYCAKRHWPGGFDHWGQGTLVTVSSASTKGPSVFPLAPSSKSTSGGT
AALGCLVKDYFPEPVTVSWNSGALTSGVHTFPAVLQSSGLYSLSSVVTVPSSSLGTQTYICNVNHKPSNTK
VDKKVEPKSCDKTHTCPPCPAPELLGGPSVFLFPPKPKDTLMISRTPEVTCVVVDVSHEDPEVKFNWYV
DGVEVHNAKTKPREEQYASTYRVVSVLTVLHQDWLNGKEYKCKVSNKALPAPIEKTISKAKGQPREPQVY
TLPPSRDELTKNQVSLTCLVKGFYPSDIAVEWESNGQPENNYKTTPPVLDSDGSFFLYSKLTVDKSRWQQG
NVFSCSVMHEALHNHYTQKSLSLSPGK
(anti-PD-L1 Ab LC; VL is underlined)
SEQ ID NO: 140
DIQMTQSPSSLSASVGDRVTITCSASQDVTTAVAWYQQKPGKAPKLLIYSASFPYRGVPSRFSGSGSGTDFT
LTISSLQPEDFATYYCQQYMYHPSTFGQGTKVEIKRTVAAPSVFIFPPSDEQLKSGTASVVCLLNNFYPREA
KVQWKVDNALQSGNSQESVTEQDSKDSTYSLSSTLTLSKADYEKHKVYACEVTHQGLSSPVTKSFNRGEC
(atezolizumab/Tecentriq anti-PD-L1 Ab HC; VH is underlined; hinge is bolded)
SEQ ID NO: 141
EVQLVESGGGLVQPGGSLRLSCAASGFTFSDSWIHWVRQAPGKGLEWVAWISPYGGSTYYADSVKGRFTI
SADTSKNTAYLQMNSLRAEDTAVYYCARRHWPGGFDYWGQGTLVTVSSASTKGPSVFPLAPSSKSTSGGT
AALGCLVKDYFPEPVTVSWNSGALTSGVHTFPAVLQSSGLYSLSSVVTVPSSSLGTQTYICNVNHKPSNTK
VDKKVEPKSCDKTHTCPPCPAPELLGGPSVFLFPPKPKDTLMISRTPEVTCVVVDVSHEDPEVKFNWYV
DGVEVHNAKTKPREEQYASTYRVVSVLTVLHQDWLNGKEYKCKVSNKALPAPIEKTISKAKGQPREPQVY
TLPPSREEMTKNQVSLTCLVKGFYPSDIAVEWESNGQPENNYKTTPPVLDSDGSFFLYSKLTVDKSRWQQG
NVFSCSVMHEALHNHYTQKSLSLSPGK
(atezolizumab/Tecentriq anti-PD-L1 Ab LC; VL is underlined)
SEQ ID NO: 142
DIQMTQSPSSLSASVGDRVTITCRASQDVSTAVAWYQQKPGKAPKLLIYSASFLYSGVPSRFSGSGSGTDFT
LTISSLQPEDFATYYCQQYLYHPATFGQGTKVEIKRTVAAPSVFIFPPSDEQLKSGTASVVCLLNNFYPREAK
VQWKVDNALQSGNSQESVTEQDSKDSTYSLSSTLTLSKADYEKHKVYACEVTHQGLSSPVTKSFNRGEC
(anti-PD-L1 Ab HC (IgG1 Fc mutant2); VH is underlined; hinge is bolded)
SEQ ID NO: 143
EVQLVESGGGLVQPGGSLRLSCAASYFPFSDSWIHWVRQAPGKGLEWVAWISPYGGSSYYADSVODRFTIS
ADTSKNTAYLQMNSLRAEDTAVYYCAKRHWPGGFDHWGQGTLVTVSSASTKGPSVFPLAPSSKSTSGGT
AALGCLVKDYFPEPVTVSWNSGALTSGVHTFPAVLQSSGLYSLSSVVTVPSSSLGTQTYICNVNHKPSNTK

[chemical structure]

DGVEVHNAKTKPREEQYNSTYRVVSVLTVLHQDWLNGKEYKCKVSNKALPAPIEKTISKAKGQPREPQVY

[chemical structure]

DWPPVLDSDGSFFLYSKLTVDKSRWQ
QGNVFSCSVMHEALHNHYTQKSLSLSPGK
(anti-PD-L1 Ab VH-CH1-N' hinge portion-IL-2 mutant R38D/K43E/E61R-C' hinge
portion-IgG1 Fc mutant1; VH is underlined; hinge is bolded; IL-2 mutant is italicized)
SEQ ID NO: 144
EVQLVESGGGLVQPGGSLRLSCAASYFPFSDSWIHWVRQAPGKGLEWVAWISPYGGSSYYADSVQDRFTIS
ADTSKNTAYLQMNSLRAEDTAVYYCAKRHWPGGFDHWGQGTLVTVSSASTKGPSVFPLAPSSKSTSGGT
AALGCLVKDYFPEPVTVSWNSGALTSGVHTFPAVLQSSGLYSLSSVVTVPSSSLGTQTYICNVNHKPSNTK

[chemical structure]

[chemical structure]

[chemical structure]

[chemical structure]

[chemical structure]

HYTQKSLSLSPGK
(anti-PD-L1 Ab VH-CH1-N' hinge portion-linker-IFN-a2b mutant L30A-C' hinge portion-
IgG1 Fc mutant1; VH is underlined; hinge is bolded; linker is bolded and underlined; IFN-α2b
mutant is italicized)
SEQ ID NO: 145
EVQLVESGGGLVQPGGSLRLSCAASYFPFSDSWIHWVRQAPGKGLEWVAWISPYGGSSYYADSVQDRFTIS
ADTSKNTAYLQMNSLRAEDTAVYYCAKRHWPGGFDHWGQGTLVTVSSASTKGPSVFPLAPSSKSTSGGT
AALGCLVKDYFPEPVTVSWNSGALTSGVHTFPAVLQSSGLYSLSSVVTVPSSSLGTQTYICNVNHKPSNTK

[chemical structure]

TIPVLHEMIQQIFNLFSTKDSSAAWDETLLDKFYTELYQQLNDLEACVIQGVGVTETPLMKEDSILAVRKYFQRITL

[chemical structure]

EVTCVVVDVSHEDPEVKFNWYVDGVEVHNAKTKPREEQYNSTYRVVSVLTVLHQDWLNGKEYKCKVSN

[chemical structure]

[chemical structure]

(anti-PD-L1 Ab VH-CH1-N' hinge portion-linker-single-chain IFN-y mutant A23V
homodimer-C' hinge portion-IgG1 Fc mutant1; VH is underlined; hinge is bolded; linker is bolded
and underlined; IFN-γ mutant monomer is italicized)
SEQ ID NO: 146
EVQLVESGGGLVQPGGSLRLSCAASYFPFSDSWIHWVRQAPGKGLEWVAWISPYGGSSYYADSVODRFTIS
ADTSKNTAYLQMNSLRAEDTAVYYCAKRHWPGGFDHWGQGTLVTVSSASTKGPSVFPLAPSSKSTSGGT
AALGCLVKDYFPEPVTVSWNSGALTSGVHTFPAVLQSSGLYSLSSVVTVPSSSLGTQTYICNVNHKPSNTK

[chemical structure]

KNFKDDOSIOKSVETIKEDMNVKFFNSNKKKRDDFEKLTNYSVTDLNVORKAIHELIOVMAELSPAAKTGKRKRS

[chemical structure]

MQSQIVSFYFKLFKNFKDDOSIQKSVETIKEDMNVKFFNSNKKKRDDFEKLTNYSVTDLNVORKAIHELIQVMAE

[chemical structure]

VKFNWYVDGVEVHNAKTKPREEQYNSTYRVVSVLTVLHQDWLNGKEYKCKVSNKALPAPIEKTISKAKG

[chemical structure]

VDKSRWQQGNVFSCSVMHEALHNHYTQKSLSLSPGK
(anti-PD-L1 Ab VH-CH1-N' hinge portion-linker-single-chain IL-10 mutant R27A
homodimer-C' hinge portion-IgG1 Fc mutant1; VH is underlined; hinge is bolded; linker is
bolded and underlined; IL-10 mutant monomer is italicized)
SEQ ID NO: 147
EVQLVESGGGLVQPGGSLRLSCAASYFPFSDSWIHWVRQAPGKGLEWVAWISPYGGSSYYADSVQDRFTIS
ADTSKNTAYLQMNSLRAEDTAVYYCAKRHWPGGFDHWGQGTLVTVSSASTKGPSVFPLAPSSKSTSGGT
AALGCLVKDYFPEPVTVSWNSGALTSGVHTFPAVLQSSGLYSLSSVVTVPSSSLGTQTYICNVNHKPSNTK

[chemical structure]

KGYLGCQALSEMIQFYLEEVMPQAENQDPDIKAHVNSLGENLKTLRLRLRRCHRFLPCENKSKAVEQVKNAFNK
LQEKGIYKAMSEFDIFINYIEAYMTMKIRNFEGGGSGGGGSGGGGSGGGGSSPGQGTQSENSCTHFPGNLPN

[chemical structure]

ENLKTLRLRLRRCHRFLPCENKSKAVEQVKNAFNKLQEKGIYKAMSEFDIFINYIEAYMTMKIRNDKTHTCPPCP

[chemical structure]

[chemical structure]

[chemical structure]

SLSLSPGK
(anti-PD-L1 Ab VH-CH1-N' hinge portion-linker-single-chain IL-12 mutant heterodimer
IL-12B (p40 E59A/F60A)-linker-IL-12A (wt p35)-C' hinge portion-IgG1 Fc mutant1; VH is
underlined; hinge is bolded; linker is bolded and underlined; IL-12 subunits are italicized)
SEQ ID NO: 148
EVQLVESGGGLVQPGGSLRLSCAASYFPFSDSWIHWVRQAPGKGLEWVAWISPYGGSSYYADSVQDRFTIS
ADTSKNTAYLQMNSLRAEDTAVYYCAKRHWPGGFDHWGQGTLVTVSSASTKGPSVFPLAPSSKSTSGGT
AALGCLVKDYFPEPVTVSWNSGALTSGVHTFPAVLQSSGLYSLSSVVTVPSSSLGTQTYICNVNHKPSNTK
VDKKVEPKSCDKPGSGIWELKKDVYVVELDWYPDAPGEMVVLTCDTPEEDGITWTLDOSSEVLGSGKTLTIQV

[chemical structure]

SVKSSRGSSDPQGVTCGAATLSAERVRGDNKEYEYSVECQEDSACPAAEESLPIEVMVDAVHKLKYENYTSSFFIRD
IIKPDPPKNLOLKPLKNSRQVEVSWEYPDTWSTPHSYFSLTFCVQVQGKSKREKKDRVFTDKTSATVICRKNASISV
RAQDRYYSSSWSEWASVPCSGGGGSGGGGSGGGGSGGGGSGRNLPVATPDPGMFPCLHHSONLLRAVSNML
QKARQTLEFYPCTSEEIDHEDITKDKTSTVEACLPLELTKNESCLNSRETSFITNGSCLASRKTSFMMALCLSSIYED
LKMYQVEFKTMNAKLLMDPKRQIFLDQNMLAVIDELMQALNFNSETVPQKSSLEEPDFYKTKIKLCILLHAFRIRA

[chemical structure]

VDGVEVHNAKTKPREEQYNSTYRVVSVLTVLHQDWLNGKEYKCKVSNKALPAPIEKTISKAKGQPREPQV

[chemical structure]

QGNVFSCSVMHEALHNHYTQKSLSLSPGK
(anti-PD-L1 Ab VH-CH1-N' hinge portion-linker-single-chain IL-23 mutant heterodimer
IL-12B (p40 E59A/F60A)-linker-IL-23A (wt p19)-C' hinge portion-IgG1 Fc mutant1; VH is
underlined; hinge is bolded; linker is bolded and underlined; IL-23 subunits are italicized)
SEQ ID NO: 149
EVQLVESGGGLVQPGGSLRLSCAASYFPFSDSWIHWVRQAPGKGLEWVAWISPYGGSSYYADSVQDRFTIS
ADTSKNTAYLQMNSLRAEDTAVYYCAKRHWPGGFDHWGQGTLVTVSSASTKGPSVFPLAPSSKSTSGGT
AALGCLVKDYFPEPVTVSWNSGALTSGVHTFPAVLQSSGLYSLSSVVTVPSSSLGTQTYICNVNHKPSNTK
VDKKVEPKSCDKPGSGIWELKKDVYVVELDWYPDAPGEMVVLTCDTPEEDGITWTLDQSSEVLGSGKTLTIQV

[chemical structure]

SVKSSRGSSDPQGVTCGAATLSAERVRGDNKEYEYSVECQEDSACPAAEESLPIEVMVDAVHKLKYENYTSSFFIRD
IIKPDPPKNLOLKPLKNSRQVEVSWEYPDTWSTPHSYFSLTFCVQVQGKSKREKKDRVFTDKTSATVICRKNASISV
RAQDRYYSSSWSEWASVPCSGGGGSGGGGSGGGGSGGGGSGRAVPGGSSPAWTQCQQLSQKLCTLAWSAHP
LVGHMDLREEGDEETTNDVPHIQCGDGCDPQGLRDNSQFCLQRIHQGLIFYEKLLGSDIFTGEPSLLPDSPVGQ
LHASLLGLSQLLQPEGHHWETQQIPSLSPSQPWQRLLLRFKILRSLQAFVAVAARVFAHGAATLSPDKTHTCPPC

[chemical structure]

[chemical structure]

[chemical structure]

KSLSLSPGK
(trastuzumab/Herceptin anti-HER2 Ab HC-CDR1)
SEQ ID NO: 188
GFNIKDTYIH
(trastuzumab/Herceptin anti-HER2 Ab HC-CDR2)
SEQ ID NO: 189
RIYPTNGYTRYADSVKG
(trastuzumab/Herceptin anti-HER2 Ab HC-CDR3)
SEQ ID NO: 190
WGGDGFYAMDY
(trastuzumab/Herceptin anti-HER2 Ab LC-CDR1)
SEQ ID NO: 191
RASQDVNTAVA
(trastuzumab/Herceptin anti-HER2 Ab LC-CDR2)
SEQ ID NO: 192
SASFLYS
(trastuzumab/Herceptin anti-HER2 Ab LC-CDR3)
SEQ ID NO: 193
QQHYTTPPT
(trastuzumab/Herceptin anti-HER2 Ab VH)
SEQ ID NO: 150
EVQLVESGGGLVQPGGSLRLSCAASGFNIKDTYIHWVRQAPGKGLEWVARIYPTNGYTRYADSVKGRFTIS
ADTSKNTAYLQMNSLRAEDTAVYYCSRWGGDGFYAMDYWGQGTLVTVSSAS
(trastuzumab/Herceptin anti-HER2 Ab VL)
SEQ ID NO: 151
DIQMTQSPSSLSASVGDRVTITCRASQDVNTAVAWYQQKPGKAPKLLIYSASFLYSGVPSRFSGSRSGTDFT
LTISSLQPEDFATYYCQQHYTTPPTFGQGTK VEI
(anti-HER2 Ab HC (IgG1 Fc mutant); VH is underlined; hinge is bolded)
SEQ ID NO: 152
EVQLVESGGGLVQPGGSLRLSCAASGFNIKDTYIHWVRQAPGKGLEWVARIYPTNGYTRYADSVKGRFTIS
ADTSKNTAYLQMNSLRAEDTAVYYCSRWGGDGFYAMDYWGQGTLVTVSSASTKGPSVFPLAPSSKSTSG
GTAALGCLVKDYFPEPVTVSWNSGALTSGVHTFPAVLQSSGLYSLSSVVTVPSSSLGTQTYICNVNHKPSNT
KVDKKVEPKSCDKTHTCPPCPAPELLGGPSVFLFPPKPKDTLMISRTPEVTCVVVDVSHEDPEVKFNWY
VDGVEVHNAKTKPREEQYASTYRVVSVLTVLHQDWLNGKEYKCKVSNKALPAPIEKTISKAKGQPREPQV
YTLPPSRDELTKNQVSLTCLVKGFYPSDIA VEWESNGQPENNYKTTPPVLDSDGSFFLYSKLTVDKSRWQQ
GNVFSCSVMHEALHNHYTQKSLSLSPGK
(trastuzumab/Herceptin anti-HER2 Ab HC; VH is underlined; hinge is bolded)
SEQ ID NO: 153
EVQLVESGGGLVQPGGSLRLSCAASGFNIKDTYIHWVRQAPGKGLEWVARIYPTNGYTRYADSVKGRFTIS
ADTSKNTAYLQMNSLRAEDTAVYYCSRWGGDGFYAMDYWGQGTLVTVSSASTKGPSVFPLAPSSKSTSG
GTAALGCLVKDYFPEPVTVSWNSGALTSGVHTFPAVLQSSGLYSLSSVVTVPSSSLGTQTYICNVNHKPSNT
KVDKKVEPKSCDKTHTCPPCPAPELLGGPSVFLFPPKPKDTLMISRTPEVTCVVVDVSHEDPEVKFNWY
VDGVEVHNAKTKPREEQYNSTYRVVSVLTVLHQDWLNGKEYKCKVSNKALPAPIEKTISKAKGQPREPQV
YTLPPSREEMTKNQVSLTCLVKGFYPSDIAVEWESNGQPENNYKTTPPVLDSDGSFFLYSKLTVDKSRWQQ
GNVFSCSVMHEALHNHYTQKSLSLSPGK
(trastuzumab/Herceptin anti-HER2 Ab LC; VL is underlined)
SEQ ID NO: 154
DIQMTQSPSSLSASVGDRVTITCRASQDVNTAVAWYQQKPGKAPKLLIYSASFLYSGVPSRFSGSRSGTDFT
LTISSLQPEDFATYYCQQHYTTPPTFGQGTKVEIKRTVAAPSVFIFPPSDEQLKSGTASVVCLLNNFYPREAK
VQWKVDNALQSGNSQESVTEQDSKDSTYSLSSTLTLSKADYEKHKVYACEVTHQGLSSPVTKSFNRGEC
(anti-HER2 Ab HC (IgG1 Fc mutant2); VH is underlined; hinge is bolded)
SEQ ID NO: 155
EVQLVESGGGLVQPGGSLRLSCAASGFNIKDTYIHWVRQAPGKGLEWVARIYPTNGYTRYADSVKGRFTIS
ADTSKNTAYLQMNSLRAEDTAVYYCSRWGGDGFYAMDYWGQGTLVTVSSASTKGPSVFPLAPSSKSTSG
GTAALGCLVKDYFPEPVTVSWNSGALTSGVHTFPAVLQSSGLYSLSSVVTVPSSSLGTQTYICNVNHKPSNT

[chemical structure]

VDGVEVHNAKTKPREEQYNSTYRVVSVLTVLHQDWLNGKEYKCKVSNKALPAPIEKTISKAKGQPREPQV

[chemical structure]

QQGNVFSCSVMHEALHNHYTQKSLSLSPGK
(anti-HER2 Ab VH-CH1-N' hinge portion-IL-2 mutant R38D/K43E/E61R-C' hinge
portion-IgG1 Fc mutant1; VH is underlined; hinge is bolded; IL-2 mutant is italicized)
SEQ ID NO: 156
EVQLVESGGGLVQPGGSLRLSCAASGFNIKDTYIHWVRQAPGKGLEWVARIYPTNGYTRYADSVKGRFTIS
ADTSKNTAYLQMNSLRAEDTAVYYCSRWGGDGFYAMDYWGQGTLVTVSSASTKGPSVFPLAPSSKSTSG
GTAALGCLVKDYFPEPVTVSWNSGALTSGVHTFPAVLQSSGLYSLSSVVTVPSSSLGTQTYICNVNHKPSNT

[chemical structure]

[chemical structure]

[chemical structure]

[chemical structure]

[chemical structure]

NHYTQKSLSLSPGK
(anti-HER2 Ab VH-CH1-N' hinge portion-linker-IFN-α2b mutant L30A-C' hinge portion-
IgG1 Fc mutant1; VH is underlined; hinge is bolded; linker is bolded and underlined;
IFN-α2b mutant is italicized)
SEQ ID NO: 157
EVQLVESGGGLVQPGGSLRLSCAASGFNIKDTYIHWVRQAPGKGLEWVARIYPTNGYTRYADSVKGRFTIS
ADTSKNTAYLQMNSLRAEDTAVYYCSRWGGDGFYAMDYWGQGTLVTVSSASTKGPSVFPLAPSSKSTSG
GTAALGCLVKDYFPEPVTVSWNSGALTSGVHTFPAVLQSSGLYSLSSVVTVPSSSLGTQTYICNVNHKPSNT

[chemical structure]

ETIPVLHEMIQQIFNLFSTKDSSAAWDETLLDKFYTELYQQLNDLEACVIQGVGVTETPLMKEDSILAVRKYFQRIT

[chemical structure]

PEVTCVVVDVSHEDPEVKFNWYVDGVEVHNAKTKPREEQYNSTYRVVSVLTVLHQDWLNGKEYKCKVS

[chemical structure]

[chemical structure]

(anti-HER2 Ab VH-CH1-N' hinge portion-linker-single-chain IFN-γ mutant A23V
homodimer-C' hinge portion-IgG1 Fc mutant1; VH is underlined; hinge is bolded; linker is bolded
and underlined; IFN-γ mutant monomer is italicized)
SEQ ID NO: 158
EVQLVESGGGLVQPGGSLRLSCAASGFNIKDTYIHWVRQAPGKGLEWVARIYPTNGYTRYADSVKGRFTIS
ADTSKNTAYLQMNSLRAEDTAVYYCSRWGGDGFYAMDYWGQGTLVTVSSASTKGPSVFPLAPSSKSTSG
GTAALGCLVKDYFPEPVTVSWNSGALTSGVHTFPAVLQSSGLYSLSSVVTVPSSSLGTQTYICNVNHKPSNT

[chemical structure]

FKNFKDDQSIQKSVETIKEDMNVKFFNSNKKKRDDFEKLTNYSVTDLNVORKAIHELIQVMAELSPAAKTGKRKR

[chemical structure]

KIMQSQIVSFYFKLFKNFKDDOSIOKSVETIKEDMNVKFFNSNKKKRDDFEKLTNYSVTDLNVQRKAIHELIQVMA

[chemical structure]

VKFNWYVDGVEVHNAKTKPREEQYNSTYRVVSVLTVLHQDWLNGKEYKCKVSNKALPAPIEKTISKAKG

[chemical structure]

VDKSRWQQGNVFSCSVMHEALHNHYTQKSLSLSPGK
(anti-HER2 Ab VH-CH1-N' hinge portion-linker-single-chain IL-10 mutant R27A
homodimer-C' hinge portion-IgG1 Fc mutant1; VH is underlined; hinge is bolded; linker is
bolded and underlined; IL-10 mutant monomer is italicized)
SEQ ID NO: 159
EVQLVESGGGLVQPGGSLRLSCAASGFNIKDTYIHWVRQAPGKGLEWVARIYPTNGYTRYADSVKGRFTIS
ADTSKNTAYLQMNSLRAEDTAVYYCSRWGGDGFYAMDYWGQGTLVTVSSASTKGPSVFPLAPSSKSTSG
GTAALGCLVKDYFPEPVTVSWNSGALTSGVHTFPAVLQSSGLYSLSSVVTVPSSSLGTQTYICNVNHKPSNT

[chemical structure]

FKGYLGCQALSEMIQFYLEEVMPQAENQDPDIKAHVNSLGENLKTLRLRLRRCHRFLPCENKSKAVEQVKNAFN
KLQEKGIYKAMSEFDIFINYIEAYMTMKIRNFEGGGSGGGGSGGGGSGGGGSSPGQGTQSENSCTHFPGNLPN

[chemical structure]

ENLKTLRLRLRRCHRFLPCENKSKAVEQVKNAFNKLQEKGIYKAMSEFDIFINYIEAYMTMKIRNDKTHTCPPCP

[chemical structure]

[chemical structure]

[chemical structure]

SLSLSPGK
(anti-HER2 Ab VH-CH1-N' hinge portion-linker-single-chain IL-12 mutant heterodimer
IL-12B (p40 E59A/F60A)-linker-IL-12A (wt p35)-C' hinge portion-IgG1 Fc mutant1; VH is
underlined; hinge is bolded; linker is bolded and underlined; IL-12 subunits are italicized)
SEQ ID NO: 160
EVQLVESGGGLVQPGGSLRLSCAASGFNIKDTYIHWVRQAPGKGLEWVARIYPTNGYTRYADSVKGRFTIS
ADTSKNTAYLQMNSLRAEDTAVYYCSRWGGDGFYAMDYWGQGTLVTVSSASTKGPSVFPLAPSSKSTSG
GTAALGCLVKDYFPEPVTVSWNSGALTSGVHTFPAVLQSSGLYSLSSVVTVPSSSLGTQTYICNVNHKPSNT
KVDKKVEPKSCDKPGSGIWELKKDVYVVELDWYPDAPGEMVVLTCDTPEEDGITWTLDQSSEVLGSGKTLTIQ

[chemical structure]

FSVKSSRGSSDPQGVTCGAATLSAERVRGDNKEYEYSVECQEDSACPAAEESLPIEVMVDAVHKLKYENYTSSFFIR
DIIKPDPPKNLOLKPLKNSRQVEVSWEYPDTWSTPHSYFSLTFCVQVQGKSKREKKDRVFTDKTSATVICRKNASIS
VRAQDRYYSSSWSEWASVPCSGGGGSGGGGSGGGGSGGGGSGRNLPVATPDPGMFPCLHHSQNLLRAVSNM
LQKARQTLEFYPCTSEEIDHEDITKDKTSTVEACLPLELTKNESCLNSRETSFITNGSCLASRKTSFMMALCLSSIYE
DLKMYQVEFKTMNAKLLMDPKRQIFLDQNMLAVIDELMQALNFNSETVPQKSSLEEPDFYKTKIKLCILLHAFRI

[chemical structure]

YVDGVEVHNAKTKPREEQYNSTYRVVSVLTVLHQDWLNGKEYKCKVSNKALPAPIEKTISKAKGQPREPQ

[chemical structure]

QQGNVFSCSVMHEALHNHYTQKSLSLSPGK
(anti-HER2 Ab VH-CH1-N' hinge portion-linker-single-chain IL-23 mutant heterodimer
IL-12B (p40 E59A/F60A)-linker-IL-23A (wt p19)-C' hinge portion-IgG1 Fc mutant1; VH is
underlined; hinge is bolded; linker is bolded and underlined; IL-23 subunits are italicized)
SEQ ID NO: 161
EVQLVESGGGLVQPGGSLRLSCAASGFNIKDTYIHWVRQAPGKGLEWVARIYPTNGYTRYADSVKGRFTIS
ADTSKNTAYLQMNSLRAEDTAVYYCSRWGGDGFYAMDYWGQGTLVTVSSASTKGPSVFPLAPSSKSTSG
GTAALGCLVKDYFPEPVTVSWNSGALTSGVHTFPAVLQSSGLYSLSSVVTVPSSSLGTQTYICNVNHKPSNT
KVDKKVEPKSCDKPGSGIWELKKDVYVVELDWYPDAPGEMVVLTCDTPEEDGITWTLDQSSEVLGSGKTLTIQ

[chemical structure]

FSVKSSRGSSDPQGVTCGAATLSAERVRGDNKEYEYSVECQEDSACPAAEESLPIEVMVDAVHKLKYENYTSSFFIR
DIIKPDPPKNLQLKPLKNSRQVEVSWEYPDTWSTPHSYFSLTFCVQVQGKSKREKKDRVFTDKTSATVICRKNASIS
VRAQDRYYSSSWSEWASVPCSGGGGSGGGGSGGGGSGGGGSGRAVPGGSSPAWTQCQQLSQKLCTLAWSAH
PLVGHMDLREEGDEETTNDVPHIQCGDGCDPQGLRDNSQFCLORIHQGLIFYEKLLGSDIFTGEPSLLPDSPVG
QLHASLLGLSQLLQPEGHHWETQQIPSLSPSQPWQRLLLRFKILRSLQAFVAVAARVFAHGAATLSPDKTHTCPP

[chemical structure]

[chemical structure]

[chemical structure]

QKSLSLSPGK
(basiliximab/Simulect anti-CD25 Ab VH)
SEQ ID NO: 162
QLQQSGTVLARPGASVKMSCKASGYSFTRYWMHWIKQRPGQGLEWIGAIYPGNSDTSYNQKFEGKAKLT
AVTSASTAYMELSSLTHEDSAVYYCSRDYGYYFDFWGQGTTLTVSSAS
(basiliximab/Simulect anti-CD25 Ab VL)
SEQ ID NO: 163
QIVSTQSPAIMSASPGEKVTMTCSASSSRSYMQWYQQKPGTSPKRWIYDTSKLASGVPARFSGSGSGTSYSL
TISSMEAEDAATYYCHQRSSYTFGGGTKLEI
(anti-CD25 Ab HC (IgG1 Fc mutant); VH is underlined; hinge is bolded)
SEQ ID NO: 164
QLQQSGTVLARPGASVKMSCKASGYSFTRYWMHWIKQRPGQGLEWIGAIYPGNSDTSYNQKFEGKAKLT
AVTSASTAYMELSSLTHEDSAVYYCSRDYGYYFDFWGQGTTLTVSSASTKGPSVFPLAPSSKSTSGGTAAL
GCLVKDYFPEPVTVSWNSGALTSGVHTFPAVLQSSGLYSLSSVVTVPSSSLGTQTYICNVNHKPSNTKVDK
KVEPKSCDKTHTCPPCPAPELLGGPSVFLFPPKPKDTLMISRTPEVTCVVVDVSHEDPEVKFNWYVDGVE
VHNAKTKPREEQYASTYRVVSVLTVLHQDWLNGKEYKCKVSNKALPAPIEKTISKAKGQPREPQVYTLPP
SRDELTKNQVSLTCLVKGFYPSDIAVEWESNGQPENNYKTTPPVLDSDGSFFLYSKLTVDKSRWQQGNVFS
CSVMHEALHNHYTQKSLSLSPGK
(basiliximab/Simulect anti-CD25 Ab LC; VL is underlined)
SEQ ID NO: 165
QIVSTQSPAIMSASPGEKVTMTCSASSSRSYMQWYQQKPGTSPKRWIYDTSKLASGVPARFSGSGSGTSYSL
TISSMEAEDAATYYCHQRSSYTFGGGTKLEIKRTVAAPSVFIFPPSDEQLKSGTASVVCLLNNFYPREAKVQ
WKVDNALQSGNSQESVTEQDSKDSTYSLSSTLTLSKADYEKHKVYACEVTHQGLSSPVTKSFNRGEC
(basiliximab/Simulect anti-CD25 Ab HC; VH is underlined; hinge is bolded)
SEQ ID NO: 166
QLQQSGTVLARPGASVKMSCKASGYSFTRYWMHWIKQRPGQGLEWIGAIYPGNSDTSYNOKFEGKAKLT
AVTSASTAYMELSSLTHEDSAVYYCSRDYGYYFDFWGQGTTLTVSSASTKGPSVFPLAPSSKSTSGGTAAL
GCLVKDYFPEPVTVSWNSGALTSGVHTFPAVLQSSGLYSLSSVVTVPSSSLGTQTYICNVNHKPSNTKVDK
RVEPPKSCDKTHTCPPCPAPELLGGPSVFLFPPKPKDTLMISRTPEVTCVVVDVSHEDPEVKFNWYVDGV
EVHNAKTKPREEQYNSTYRVVSVLTVLHQDWLNGKEYKCKVSNKALPAPIEKTISKAKGQPREPQVYTLP
PSRDELTKNQVSLTCLVKGFYPSDIAVEWESNGQPENNYKTTPPVLDSDGSFFLYSKLTVDKSRWQQGNVF
SCSVMHEALHNHYTQKSLSLSPGK
(basiliximab/Simulect anti-CD25 Ab LC; VL is underlined)
SEQ ID NO: 167
QIVSTQSPAIMSASPGEK VTMTCSASSSRSYMQWYQQKPGTSPKRWIYDTSKLASGVPARFSGSGSGTSYSL
TISSMEAEDAATYYCHQRSSYTFGGGTKLEIKRTVAAPSVFIFPPSDEQLKSGTASVVCLLNNFYPREAKVQ
WKVDNALQSGNSQESVTEQDSKDSTYSLSSTLTLSKADYEKHKVYACEVTHQGLSSPVTKSFNRGE
(anti-CD25 Ab HC (IgG1 Fc mutant2); VH is underlined; hinge is bolded)
SEQ ID NO: 168
QLQQSGTVLARPGASVKMSCKASGYSFTRYWMHWIKQRPGQGLEWIGAIYPGNSDTSYNQKFEGKAKLT
AVTSASTAYMELSSLTHEDSAVYYCSRDYGYYFDFWGOGTTLTVSSASTKGPSVFPLAPSSKSTSGGTAAL
GCLVKDYFPEPVTVSWNSGALTSGVHTFPAVLQSSGLYSLSSVVTVPSSSLGTQTYICNVNHKPSNTKVDK

[chemical structure]

[chemical structure]

VFSCSVMHEALHNHYTQKSLSLSPGK
(anti-CD25 Ab VH-CH1-N' hinge portion-IL-2 mutant R38D/K43E/E61R-C' hinge portion-
IgG1 Fc mutant1; VH is underlined; hinge is bolded; IL-2 mutant is italicized)
SEQ ID NO: 169
QLQQSGTVLARPGASVKMSCKASGYSFTRYWMHWIKQRPGQGLEWIGAIYPGNSDTSYNOKFEGKAKLT
AVTSASTAYMELSSLTHEDSAVYYCSRDYGYYFDFWGQGTTLTVSSASTKGPSVFPLAPSSKSTSGGTAAL
GCLVKDYFPEPVTVSWNSGALTSGVHTFPAVLQSSGLYSLSSVVTVPSSSLGTQTYICNVNHKPSNTKVDK

[chemical structure]

PLEEVLNLAOSKNFHLRPRDLISNINVIVLELKGSETTFMCEYADETATIVEFLNRWITFCOSIISTLTDKTHTCPPC

[chemical structure]

[chemical structure]

[chemical structure]

KSLSLSPGK
(anti-CD25 Ab VH-CH1-N' hinge portion-linker-IFN-a2b mutant L30A-C' hinge portion-
IgG1 Fc mutant1; VH is underlined; hinge is bolded; linker is bolded and underlined;
IFN-α2b mutant is italicized)
SEQ ID NO: 170
QLQQSGTVLARPGASVKMSCKASGYSFTRYWMHWIKQRPGQGLEWIGAIYPGNSDTSYNQKFEGKAKLT
AVTSASTAYMELSSLTHEDSAVYYCSRDYGYYFDFWGOGTTLTVSSASTKGPSVFPLAPSSKSTSGGTAAL
GCLVKDYFPEPVTVSWNSGALTSGVHTFPAVLQSSGLYSLSSVVTVPSSSLGTQTYICNVNHKPSNTKVDK

[chemical structure]

LHEMIQQIFNLFSTKDSSAAWDETLLDKFYTELYQQLNDLEACVIQGVGVTETPLMKEDSILAVRKYFORITLYLKE

[chemical structure]

VVVDVSHEDPEVKFNWYVDGVEVHNAKTKPREEQYNSTYRVVSVLTVLHQDWLNGKEYKCKVSNKALP

[chemical structure]

[chemical structure]

(anti-CD25 Ab VH-CH1-N' hinge portion-linker-single-chain IFN-γ mutant A23V
homodimer-C' hinge portion-IgG1 Fc mutant1; VH is underlined; hinge is bolded; linker is
bolded and underlined; IFN-γ mutant monomer is italicized)
SEQ ID NO: 171
QLQQSGTVLARPGASVKMSCKASGYSFTRYWMHWIKQRPGQGLEWIGAIYPGNSDTSYNQKFEGKAKLT
AVTSASTAYMELSSLTHEDSAVYYCSRDYGYYFDFWGQGTTLTVSSASTKGPSVFPLAPSSKSTSGGTAAL
GCLVKDYFPEPVTVSWNSGALTSGVHTFPAVLQSSGLYSLSSVVTVPSSSLGTQTYICNVNHKPSNTKVDK

[chemical structure]

KDDQSIOKSVETIKEDMNVKFFNSNKKKRDDFEKLTNYSVTDLNVORKAIHELIQVMAELSPAAKTGKRKRSQML

[chemical structure]

QIVSFYFKLFKNFKDDQSIQKSVETIKEDMNVKFFNSNKKKRDDFEKLTNYSVTDLNVORKAIHELIQVMAELSPA

[chemical structure]

WYVDGVEVHNAKTKPREEQYNSTYRVVSVLTVLHQDWLNGKEYKCKVSNKALPAPIEKTISKAKGQPRE

[chemical structure]

RWQQGNVFSCSVMHEALHNHYTQKSLSLSPGK
(anti-CD25 Ab VH-CH1-N' hinge portion-linker-single-chain IL-10 mutant R27A
homodimer-C' hinge portion-IgG1 Fc mutant1; VH is underlined; hinge is bolded; linker is
bolded and underlined; IL-10 mutant monomer is italicized)
SEQ ID NO: 172
QLQQSGTVLARPGASVKMSCKASGYSFTRYWMHWIKQRPGQGLEWIGAIYPGNSDTSYNOKFEGKAKLT
AVTSASTAYMELSSLTHEDSAVYYCSRDYGYYFDFWGQGTTLTVSSASTKGPSVFPLAPSSKSTSGGTAAL
GCLVKDYFPEPVTVSWNSGALTSGVHTFPAVLQSSGLYSLSSVVTVPSSSLGTQTYICNVNHKPSNTKVDK

[chemical structure]

LGCQALSEMIQFYLEEVMPQAENQDPDIKAHVNSLGENLKTLRLRLRRCHRFLPCENKSKAVEQVKNAFNKLQE
KGIYKAMSEFDIFINYIEAYMTMKIRNFEGGGSGGGGSGGGGSGGGGSSPGQGTQSENSCTHFPGNLPNMLR

[chemical structure]

KTLRLRLRRCHRFLPCENKSKAVEQVKNAFNKLQEKGIYKAMSEFDIFINYIEAYMTMKIRNDKTHTCPPCPAPE

[chemical structure]

[chemical structure]

[chemical structure]

LSPGK
(anti-CD25 Ab VH-CH1-N' hinge portion-linker-single-chain IL-12 mutant heterodimer IL-
12B (p40 E59A/F60A)-linker-IL-12A (wt p35)-C' hinge portion-IgG1 Fc mutant1; VH is underlined;
hinge is bolded; linker is bolded and underlined; IL-12 subunits are italicized)
SEQ ID NO: 173
QLQQSGTVLARPGASVKMSCKASGYSFTRYWMHWIKQRPGQGLEWIGAIYPGNSDTSYNQKFEGKAKLT
AVTSASTAYMELSSLTHEDSAVYYCSRDYGYYFDFWGQGTTLTVSSASTKGPSVFPLAPSSKSTSGGTAAL
GCLVKDYFPEPVTVSWNSGALTSGVHTFPAVLQSSGLYSLSSVVTVPSSSLGTQTYICNVNHKPSNTKVDK

[chemical structure]

GDAGQYTCHKGGEVLSHSLLLLHKKEDGIWSTDILKDOKEPKNKTFLRCEAKNYSGRFTCWWLTTISTDLTFSVK
SSRGSSDPQGVTCGAATLSAERVRGDNKEYEYSVECOEDSACPAAEESLPIEVMVDAVHKLKYENYTSSFFIRDIIK
PDPPKNLOLKPLKNSROVEVSWEYPDTWSTPHSYFSLTFCVOVOGKSKREKKDRVFTDKTSATVICRKNASISVRA
QDRYYSSSWSEWASVPCSGGGGSGGGGSGGGGSGGGGSGRNLPVATPDPGMFPCLHHSQNLLRAVSNMLQK
ARQTLEFYPCTSEEIDHEDITKDKTSTVEACLPLELTKNESCLNSRETSFITNGSCLASRKTSFMMALCLSSIYEDLK
MYQVEFKTMNAKLLMDPKROIFLDONMLAVIDELMQALNFNSETVPQKSSLEEPDFYKTKIKLCILLHAFRIRAVT

[chemical structure]

GVEVHNAKTKPREEQYNSTYRVVSVLTVLHQDWLNGKEYKCKVSNKALPAPIEKTISKAKGQPREPQVY

[chemical structure]

GNVFSCSVMHEALHNHYTQKSLSLSPGK
(anti-CD25 Ab VH-CH1-N' hinge portion-linker-single-chain IL-23 mutant heterodimer IL-
12B (p40 E59A/F60A)-linker-IL-23A (wt p19)-C' hinge portion-IgG1 Fc mutant1; VH is underlined;
hinge is bolded; linker is bolded and underlined; IL-23 subunits are italicized)
SEQ ID NO: 174
QLQQSGTVLARPGASVKMSCKASGYSFTRYWMHWIKQRPGQGLEWIGAIYPGNSDTSYNQKFEGKAKLT
AVTSASTAYMELSSLTHEDSAVYYCSRDYGYYFDFWGQGTTLTVSSASTKGPSVFPLAPSSKSTSGGTAAL
GCLVKDYFPEPVTVSWNSGALTSGVHTFPAVLQSSGLYSLSSVVTVPSSSLGTQTYICNVNHKPSNTKVDK

[chemical structure]

GDAGQYTCHKGGEVLSHSLLLLHKKEDGIWSTDILKDOKEPKNKTFLRCEAKNYSGRFTCWWLTTISTDLTFSVK
SSRGSSDPQGVTCGAATLSAERVRGDNKEYEYSVECQEDSACPAAEESLPIEVMVDAVHKLKYENYTSSFFIRDIIK
PDPPKNLOLKPLKNSRQVEVSWEYPDTWSTPHSYFSLTFCVQVQGKSKREKKDRVFTDKTSATVICRKNASISVRA
QDRYYSSSWSEWASVPCSGGGGSGGGGSGGGGSGGGGSGRAVPGGSSPAWTQCQQLSQKLCTLAWSAHPLV
GHMDLREEGDEETTNDVPHIQCGDGCDPQGLRDNSQFCLQRIHQGLIFYEKLLGSDIFTGEPSLLPDSPVGQLH
ASLLGLSQLLQPEGHHWETQQIPSLSPSQPWQRLLLRFKILRSLQAFVAVAARVFAHGAATLSPDKTHTCPPCPA

[chemical structure]

[chemical structure]

[chemical structure]

LSLSPGK
(wildtype human PD-L2; signal peptide is italicized; extracellular domain is underlined;
cytoplasmic domain is bolded)
SEQ ID NO: 175
MIFLLLMLSLELQLHQIAALFTVTVPKELYIIEHGSNVTLECNFDTGSHVNLGAITASLQKVENDTSPHRERAT
LLEEQLPLGKASFHIPQVQVRDEGQYQCIIIYGVAWDYKYLTLKVKASYRKINTHILKVPETDEVELTCQAT
GYPLAEVSWPNVSVPANTSHSRTPEGLYQVTSVLRLKPPPGRNFSCVFWNTHVRELTLASIDLQSQMEPRT
HPTWLLHIFIPFCIIAFIFIATVIALRKQLCQKLYSSKDTTKRPVTTTKREVNSAI
(wildtype human PD-L2 extracellular domain)
SEQ ID NO: 176
LFTVTVPKELYIIEHGSNVTLECNFDTGSHVNLGAITASLQKVENDTSPHRERATLLEEQLPLGKASFHIPQV
QVRDEGQYQCIIIYGVAWDYKYLTLKVKASYRKINTHILKVPETDEVELTCQATGYPLAEVSWPNVSVPAN
TSHSRTPEGLYQVTSVLRLKPPPGRNFSCVFWNTHVRELTLASIDLQSQMEPRTHPT
(wildtype human PD-L2 extracellular domain-hinge-IgG1 Fc mutant; PD-L2 is underlined;
hinge is bolded)
SEQ ID NO: 177
LFTVTVPKELYIIEHGSNVTLECNFDTGSHVNLGAITASLQKVENDTSPHRERATLLEEQLPLGKASFHIPQV
QVRDEGQYQCIIIYGVAWDYKYLTLKVKASYRKINTHILKVPETDEVELTCQATGYPLAEVSWPNVSVPAN
TSHSRTPEGLYQVTSVLRLKPPPGRNFSCVFWNTHVRELTLASIDLQSQMEPRTHPTDKTHTCPPCPAPEL
LGGPSVFLFPPKPKDTLMISRTPEVTCVVVDVSHEDPEVKFNWYVDGVEVHNAKTKPREEQYASTYRVVS
VLTVLHQDWLNGKEYKCKVSNKALPAPIEKTISKAKGQPREPQVYTLPPSRDELTKNQVSLTCLVKGFYPS
DIAVEWESNGQPENNYKTTPPVLDSDGSFFLYSKLTVDKSRWQQGNVFSCSVMHEALHNHYTQKSLSLSP
GK
(wildtype human PD-L2 extracellular domain-hinge-IgG1 Fc mutant2; PD-L2 is
underlined; hinge is bolded)
SEQ ID NO: 178
LFTVTVPKELYIIEHGSNVTLECNFDTGSHVNLGAITASLOKVENDTSPHRERATLLEEQLPLGKASFHIPQV
QVRDEGQYQCIIIYGVAWDYKYLTLKVKASYRKINTHILKVPETDEVELTCQATGYPLAEVSWPNVSVPAN

[chemical structure]

[chemical structure]

[chemical structure]

[chemical structure]

SPGK
(wildtype human PD-L2 extracellular domain-hinge-IgG1 Fc mutant2; PD-L2 is
underlined; linker is bolded and underlined; hinge is bolded)
SEQ ID NO: 179
LFTVTVPKELYIIEHGSNVTLECNFDTGSHVNLGAITASLQKVENDTSPHRERATLLEEQLPLGKASFHIPQV
QVRDEGQYQCIIIYGVAWDYKYLTLKVKASYRKINTHILKVPETDEVELTCQATGYPLAEVSWPNVSVPAN
TSHSRTPEGLYQVTSVLRLKPPPGRNFSCVFWNTHVRELTLASIDLQSQMEPRTHPTGGGGSDKTHTCPPC

[chemical structure]

[chemical structure]

[chemical structure]

KSLSLSPGK
(wildtype human PD-L2 extracellular domain-linker-IL-2 mutant R38D/K43E/E61R-hinge-
IgG1 Fc mutant1; PD-L2 is underlined; linker is bolded and underlined; hinge is bolded; IL-2
mutant is italicized)
SEQ ID NO: 180
LFTVTVPKELYIIEHGSNVTLECNFDTGSHVNLGAITASLQKVENDTSPHRERATLLEEQLPLGKASFHIPQV
QVRDEGQYQCIIIYGVAWDYKYLTLKVKASYRKINTHILKVPETDEVELTCQATGYPLAEVSWPNVSVPAN
TSHSRTPEGLYQVTSVLRLKPPPGRNFSCVFWNTHVRELTLASIDLQSQMEPRTHPTGGGGSAPTSSSTKKT

[chemical structure]

[chemical structure]

DTLMISRTPEVTCVVVDVSHEDPEVKFNWYVDGVEVHNAKTKPREEQYNSTYRVVSVLTVLHQDWLNGK

[chemical structure]

[chemical structure]

(wildtype human PD-L2 extracellular domain-linker-hinge-IgG1 Fc mutant2; PD-L2 is
underlined; linker is bolded and underlined; hinge is bolded)
SEQ ID NO: 181
LFTVTVPKELYIIEHGSNVTLECNFDTGSHVNLGAITASLQKVENDTSPHRERATLLEEQLPLGKASFHIPQV
QVRDEGQYQCIIIYGVAWDYKYLTLKVKASYRKINTHILKVPETDEVELTCQATGYPLAEVSWPNVSVPAN
TSHSRTPEGLYQVTSVLRLKPPPGRNFSCVFWNTHVRELTLASIDLQSQMEPRTHPTGSGGGGGDKTHTC

[chemical structure]

[chemical structure]

[chemical structure]

YTQKSLSLSPGK
(wildtype human PD-L2 extracellular domain-linker-IFN-α2b mutant L30A-hinge-IgG1 Fc
mutant1; PD-L2 is underlined; linker is bolded and underlined; hinge is bolded; IFN-α2b mutant
is italicized)
SEQ ID NO: 182
LFTVTVPKELYIIEHGSNVTLECNFDTGSHVNLGAITASLOKVENDTSPHRERATLLEEQLPLGKASFHIPQV
QVRDEGQYQCIIIYGVAWDYKYLTLKVKASYRKINTHILKVPETDEVELTCOATGYPLAEVSWPNVSVPAN
TSHSRTPEGLYQVTSVLRLKPPPGRNFSCVFWNTHVRELTLASIDLQSQMEPRTHPTGSGGGGGCDLPQTH

[chemical structure]

KFYTELYQQLNDLEACVIQGVGVTETPLMKEDSILAVRKYFORITLYLKEKKYSPCAWEVVRAEIMRSFSLSTNLQE

[chemical structure]

[chemical structure]

[chemical structure]

SCSVMHEALHNHYTQKSLSLSPGK
(wildtype human PD-L2 extracellular domain-linker-single-chain IFN-γ mutant A23V
homodimer-hinge-IgG1 Fc mutant1; PD-L2 is underlined; linker is bolded and underlined; hinge is bolded;
IFN-γ mutant monomer is italicized)
SEQ ID NO: 183
LFTVTVPKELYIIEHGSNVTLECNFDTGSHVNLGAITASLOKVENDTSPHRERATLLEEQLPLGKASFHIPQV
QVRDEGQYQCIIIYGVAWDYKYLTLKVKASYRKINTHILKVPETDEVELTCQATGYPLAEVSWPNVSVPAN
TSHSRTPEGLYQVTSVLRLKPPPGRNFSCVFWNTHVRELTLASIDLQSQMEPRTHPTGSGGGGGQDPYVKE

[chemical structure]

NSNKKKRDDFEKLTNYSVTDLNVQRKAIHELIQVMAELSPAAKTGKRKRSQMLFRGFEGGGSGGGGSGGGGS

[chemical structure]

VETIKEDMNVKFFNSNKKKRDDFEKLTNYSVTDLNVORKAIHELIQVMAELSPAAKTGKRKRSQMLFRGDKTHT

[chemical structure]

[chemical structure]

[chemical structure]

HYTQKSLSLSPGK
(wildtype human PD-L2 extracellular domain-linker-single-chain IL-10 mutant R27A
homodimer-hinge-IgG1 Fc mutant1; PD-L2 is underlined; linker is bolded and underlined; hinge is bolded;
IL-10 mutant monomer is italicized)
SEQ ID NO: 184
LFTVTVPKELYIIEHGSNVTLECNFDTGSHVNLGAITASLOKVENDTSPHRERATLLEEQLPLGKASFHIPQV
QVRDEGQYQCIIIYGVAWDYKYLTLKVKASYRKINTHILKVPETDEVELTCQATGYPLAEVSWPNVSVPAN
TSHSRTPEGLYQVTSVLRLKPPPGRNFSCVFWNTHVRELTLASIDLQSQMEPRTHPTGSGGGGGSPGQGTQ

[chemical structure]

NQDPDIKAHVNSLGENLKTLRLRLRRCHRFLPCENKSKAVEQVKNAFNKLOEKGIYKAMSEFDIFINYIEAYMTM

[chemical structure]

LLLKESLLEDFKGYLGCQALSEMIQFYLEEVMPQAENQDPDIKAHVNSLGENLKTLRLRLRRCHRFLPCENKSKA

[chemical structure]

RTPEVTCVVVDVSHEDPEVKFNWYVDGVEVHNAKTKPREEQYNSTYRVVSVLTVLHQDWLNGKEYKCK

[chemical structure]

[chemical structure]

(wildtype human PD-L2 extracellular domain-hinge-IgG1 Fc mutant2; PD-L2 is
underlined; hinge is bolded; linker is bolded and underlined)
SEQ ID NO: 185
LFTVTVPKELYIIEHGSNVTLECNFDTGSHVNLGAITASLQKVENDTSPHRERATLLEEQLPLGKASFHIPQV
QVRDEGQYQCIIIYGVAWDYKYLTLKVKASYRKINTHILKVPETDEVELTCQATGYPLAEVSWPNVSVPAN
TSHSRTPEGLYQVTSVLRLKPPPGRNFSCVFWNTHVRELTLASIDLQSQMEPRTHPTGSGDKTHTCPPCPA

[chemical structure]

[chemical structure]

[chemical structure]

LSLSPGK
(wildtype human PD-L2 extracellular domain-linker-single-chain IL-12 mutant
heterodimer IL-12B (p40 E59A/F60A)-linker-IL-12A (wt p35)-hinge-IgG1 Fc mutant1; PD-L2 is underlined;
linker is bolded and underlined; hinge is bolded; IL-12 subunits are italicized)
SEQ ID NO: 186
LFTVTVPKELYIIEHGSNVTLECNFDTGSHVNLGAITASLQKVENDTSPHRERATLLEEQLPLGKASFHIPQV
QVRDEGQYQCIIIYGVAWDYKYLTLKVKASYRKINTHILKVPETDEVELTCQATGYPLAEVSWPNVSVPAN
TSHSRTPEGLYQVTSVLRLKPPPGRNFSCVFWNTHVRELTLASIDLQSQMEPRTHPTGSGIWELKKDVYVVEL

[chemical structure]

GIWSTDILKDOKEPKNKTFLRCEAKNYSGRFTCWWLTTISTDLTFSVKSSRGSSDPQGVTCGAATLSAERVRGDNK
EYEYSVECQEDSACPAAEESLPIEVMVDAVHKLKYENYTSSFFIRDIIKPDPPKNLQLKPLKNSRQVEVSWEYPDTW
STPHSYFSLTFCVQVQGKSKREKKDRVFTDKTSATVICRKNASISVRAQDRYYSSSWSEWASVPCSGGGGSGGGG
SGGGGSGGGGSGRNLPVATPDPGMFPCLHHSQNLLRAVSNMLQKARQTLEFYPCTSEEIDHEDITKDKTSTVE
ACLPLELTKNESCLNSRETSFITNGSCLASRKTSFMMALCLSSIYEDLKMYQVEFKTMNAKLLMDPKRQIFLDQNM

[chemical structure]

GPSVFLFPPKPKDTLMISRTPEVTCVVVDVSHEDPEVKFNWYVDGVEVHNAKTKPREEQYNSTYRVVSVL

[chemical structure]

[chemical structure]

K
(wildtype human PD-L2 extracellular domain-linker-single-chain IL-23 mutant
heterodimer IL-12B (p40 E59A/F60A)-linker-IL-23A (wt p19)-hinge-IgG1 Fc mutant1; PD-L2 is underlined;
linker is bolded and underlined; hinge is bolded; IL-23 subunits are italicized)
SEQ ID NO: 187
LFTVTVPKELYIIEHGSNVTLECNFDTGSHVNLGAITASLOKVENDTSPHRERATLLEEQLPLGKASFHIPQV
QVRDEGQYQCIIIYGVAWDYKYLTLKVKASYRKINTHILKVPETDEVELTCQATGYPLAEVSWPNVSVPAN
TSHSRTPEGLYQVTSVLRLKPPPGRNFSCVFWNTHVRELTLASIDLQSQMEPRTHPTGSGIWELKKDVYVVEL

[chemical structure]

GIWSTDILKDQKEPKNKTFLRCEAKNYSGRFTCWWLTTISTDLTFSVKSSRGSSDPQGVTCGAATLSAERVRGDNK
EYEYSVECQEDSACPAAEESLPIEVMVDAVHKLKYENYTSSFFIRDIIKPDPPKNLOLKPLKNSRQVEVSWEYPDTW
STPHSYFSLTFCVQVQGKSKREKKDRVFTDKTSATVICRKNASISVRAQDRYYSSSWSEWASVPCSGGGGSGGGG
SGGGGSGGGGSGRAVPGGSSPAWTQCQQLSQKLCTLAWSAHPLVGHMDLREEGDEETTNDVPHIQCGDGCD
PQGLRDNSQFCLQRIHQGLIFYEKLLGSDIFTGEPSLLPDSPVGQLHASLLGLSQLLQPEGHHWETQQIPSLSPSQ

[chemical structure]

TCVVVDVSHEDPEVKFNWYVDGVEVHNAKTKPREEQYNSTYRVVSVLTVLHQDWLNGKEYKCKVSNKA

[chemical structure]

[chemical structure]

(linker; n is an integer of at least 1)
SEQ ID NO: 194
(G)n
(linker; n is an integer of at least 1)
SEQ ID NO: 195
(GS)n
(linker; n is an integer of at least 1)
SEQ ID NO: 196
(GGS)n
(linker; n is an integer of at least 1)
SEQ ID NO: 197
(GGGS)n
(linker; n is an integer of at least 1)
SEQ ID NO: 198
(GGS)n(GGGS)n
(linker; n is an integer of at least 1)
SEQ ID NO: 199
(GSGGS)n
linker; n is an integer of at least 1)
SEQ ID NO: 200
(GGSGS)ₙ
(linker; n is an integer of at least 1)
SEQ ID NO: 201
(GGGGS)n
(linker)
SEQ ID NO: 202
GG
(linker)
SEQ ID NO: 203
GSG
(linker)
SEQ ID NO: 204
GGSG
(linker)
SEQ ID NO: 205
GGSGG
(linker)
SEQ ID NO: 206
GSGGGGG
(linker)
SEQ ID NO: 207
GSGSG
(linker)
SEQ ID NO: 208
GSGGG
(linker)
SEQ ID NO: 209
GGGSG
(linker)
SEQ ID NO: 210
GSSSG
(linker)
SEQ ID NO: 211
GGSGGS
(linker)
SEQ ID NO: 212
SGGGGS
(linker)
SEQ ID NO: 213
GGGGS
(linker; n is an integer of at least 1)
SEQ ID NO: 214
(GA)n
(linker)
SEQ ID NO: 215
GRAGGGGAGGGG
(linker)
SEQ ID NO: 216
GRAGGG
(linker)
SEQ ID NO: 217
GSGGGSGGGGSGGGGS
(linker)
SEQ ID NO: 218
GGGSGGGGSGGGGS
(linker)
SEQ ID NO: 219
GGGSGGSGGS
(linker)
SEQ ID NO: 220
GGSGGSGGSGGSGGG
(linker)
SEQ ID NO: 221
GGSGGSGGGGSGGGGS
(linker)
SEQ ID NO: 222
GGSGGSGGSGGSGGSGGS
(linker)
SEQ ID NO: 223
GGGGGGSGGGGSGGGGSA
(linker)
SEQ ID NO: 224
GSGGGSGGGGSGGGGSGGGGS
(linker)
SEQ ID NO: 225
KTGGGSGGGS
(linker)
SEQ ID NO: 226
GGPGGGGSGGGSGGGGS
(linker)
SEQ ID NO: 227
GGGSGGGGSGGGGSGGGGS
(linker)
SEQ ID NO: 228
GGGGSGGGGSGGGGSGGGGSG
(linker)
SEQ ID NO: 229
GGGGSGGGGSGGGGS
(linker)
SEQ ID NO: 230
ASTK GP
(linker)
SEQ ID NO: 231
DKP
(linker)
SEQ ID NO: 232
DKPGS
(linker)
SEQ ID NO: 233
PGS
(linker)
SEQ ID NO: 234
GS
(linker)
SEQ ID NO: 235
DKPGSG
(linker)
SEQ ID NO: 236
PGSG
(linker)
SEQ ID NO: 237
DKPGSGS
(linker)
SEQ ID NO: 238
PGSGS
(linker)
SEQ ID NO: 239
GSGS
(linker)
SEQ ID NO: 240
DKPGSGGGGG
(linker)
SEQ ID NO: 241
PGSGGGGG
(linker)
SEQ ID NO: 242
P
(wildtype human PD-L1; signal peptide is italicized; extracellular domain is underlined;
cytoplasmic domain is bolded)
SEQ ID NO: 249
MRIFAVFIFMTYWHLLNAFTVTVPKDLYVVEYGSNMTIECKFPVEKQLDLAALIVYWEMEDKNIIQFVHGEE
DLKVQHSSYRQRARLLKDOLSLGNAALQITDVKLQDAGVYRCMISYGGADYKRITVKVNAPYNKINQRIL
VVDPVTSEHELTCQAEGYPKAEVIWTSSDHQVLSGKTTTTNSKREEKLFNVTSTLRINTTTNEIFYCTFRRL
DPEENHTAELVIPELPLAHPPNERTHLVILGAILLCLGVALTFIFRLRKGRMMDVKKCGIQDTNSKKQSDT
HLEET
(wildtype human PD-L1 extracellular domain)
SEQ ID NO: 250
FTVTVPKDLYVVEYGSNMTIECKFPVEKQLDLAALIVYWEMEDKNIIQFVHGEEDLKVQHSSYRQRARLL
KDQLSLGNAALQITDVKLQDAGVYRCMISYGGADYKRITVKVNAPYNKINQRILVVDPVTSEHELTCQAE
GYPKAEVIWTSSDHQVLSGKTTTTNSKREEKLFNVTSTLRINTTTNEIFYCTFRRLDPEENHTAELVIPELPL
AHPPNER
SEQ ID NO: 251 (IL-2 mutant L18R/Q22E/R38D/K43E/E61R)

[chemical structure]

LAQSKNFHLRPRDLISNINVIVLELKGSETTFMCEYADETATIVEFLNRWITFCQSIISTLT
(IL-2 mutant R38D/K43E/E61R/Q126T)
SEQ ID NO: 252

[chemical structure]

[chemical structure]

(IL-2 mutant L18R/Q22E/R38D/K43E/E61R/Q126T)
SEQ ID NO: 253

[chemical structure]

[chemical structure]

(IL-2 mutant L18R/Q22E/R38D/K43E/E61R/Q126T/S130R)
SEQ ID NO: 254

[chemical structure]

[chemical structure]

(human PD-L1 extracellular domain mutant1 E58M/R113T/M115L/S117A/G119K)
SEQ ID NO: 255

[chemical structure]

[chemical structure]

GYPKAEVIWTSSDHQVLSGKTTTTNSKREEKLFNVTSTLRINTTTNEIFYCTFRRLDPEENHTAELVIPELPL
AHPPNER
(human PD-L1 extracellular domain mutant2 I54Q/E58M/R113T/M115L/S117A/G119K)
SEQ ID NO: 256

[chemical structure]

[chemical structure]

EGYPKAEVIWTSSDHQVLSGKTTTTNSKREEKLFNVTSTLRINTTTNEIFYCTFRRLDPEENHTAEL VIPELPL
AHPPNER
(human PD-L1 extracellular domain mutant3 I54Q/R113T/M115L/S117A/G119K)
SEQ ID NO: 257

[chemical structure]

[chemical structure]

GYPKAEVIWTSSDHQVLSGKTTTTNSKREEKLFNVTSTLRINTTTNEIFYCTFRRLDPEENHTAEL VIPELPL
AHPPNER
(human PD-L1 extracellular domain mutant4 I54Q/E58M/M115L/S117A/G119K)
SEQ ID NO: 258

[chemical structure]

[chemical structure]

EGYPKAEVIWTSSDHQVLSGKTTTTNSKREEKLFNVTSTLRINTTTNEIFYCTFRRLDPEENHTAELVIPELPL
AHPPNER
(human PD-L1 extracellular domain mutant5 154Q/E58M/R113T/S117A/G119K)
SEQ ID NO: 259

[chemical structure]

[chemical structure]

EGYPKAEVIWTSSDHQVLSGKTTTTNSKREEKLFNVTSTLRINTTTNEIFYCTFRRLDPEENHTAELVIPELPL
AHPPNER
(human PD-L1 extracellular domain mutant6 154Q/E58M/R113T/M115L/G119K)
SEQ ID NO: 260

[chemical structure]

[chemical structure]

GYPKAEVIWTSSDHQVLSGKTTTTNSKREEKLFNVTSTLRINTTTNEIFYCTFRRLDPEENHTAELVIPELPL
AHPPNER
(human PD-L1 extracellular domain mutant7 154Q/E58M/R113T/M115L/S117A)
SEQ ID NO: 261

[chemical structure]

[chemical structure]

EGYPKAEVIWTSSDHQVLSGKTTTTNSKREEKLFNVTSTLRINTTTNEIFYCTFRRLDPEENHTAELVIPELPL
AHPPNER
(human PD-L2 extracellular domain mutant1 T56V)
SEQ ID NO: 262

[chemical structure]

QVRDEGQYQCIIIYGVAWDYKYLTLKVKASYRKINTHILKVPETDEVELTCQATGYPLAEVSWPNVSVPAN
TSHSRTPEGLYQVTSVLRLKPPPGRNFSCVFWNTHVRELTLASIDLQSQMEPRTHPT
(human PD-L2 extracellular domain mutant2 S58V)
SEQ ID NO: 263

[chemical structure]

QVRDEGQYQCIIIYGVAWDYKYLTLKVKASYRKINTHILKVPETDEVELTCQATGYPLAEVSWPNVSVPAN
TSHSRTPEGLYQVTSVLRLKPPPGRNFSCVFWNTHVRELTLASIDLQSQMEPRTHPT
(human PD-L2 extracellular domain mutant3 Q60L)
SEQ ID NO: 264

[chemical structure]

QVRDEGQYQCIIIYGVAWDYKYLTLKVKASYRKINTHILKVPETDEVELTCQATGYPLAEVSWPNVSVPAN
TSHSRTPEGLYQVTSVLRLKPPPGRNFSCVFWNTHVRELTLASIDLQSQMEPRTHPT
(human PD-L2 extracellular domain mutant4 T56V/S58V/Q60L)
SEQ ID NO: 265

[chemical structure]

VQVRDEGQYQCIIIYGVAWDYKYLTLKVKASYRKINTHILKVPETDEVELTCQATGYPLAEVSWPNVSVPA
NTSHSRTPEGLYQVTSVLRLKPPPGRNFSCVFWNTHVRELTLASIDLQSQMEPRTHPT
(Wild-type human CD155)
SEQ ID NO: 266
MARAMAAAWPLLLVALLVLSWPPPGTGDVVVQAPTQVPGFLGDSVTLPCYLQVPNMEVTHVSQLTWAR
HGESGSMAVFHQTQGPSYSESKRLEFVAARLGAELRNASLRMFGLRVEDEGNYTCLFVTFPQGSRSVDIWL
RVLAKPQNTAEVQKVQLTGEPVPMARCVSTGGRPPAQITWHSDLGGMPNTSQVPGFLSGTVTVTSLWILV
PSSQVDGKNVTCKVEHESFEKPQLLTVNLTVYYPPEVSISGYDNNWYLGQNEATLTCDARSNPEPTGYNW
STTMGPLPPFAVAQGAQLLIRPVDKPINTTLICNVTNALGARQAELTVQVKEGPPSEHSGISRNAIIFLVLGIL
VFLILLGIGIYFYWSKCSREVLWHCHLCPSSTEHASASANGHVSYSAVSRENSSSQDPQTEGTR
(Wild-type human CD155 extracellular domain)
SEQ ID NO: 267
WPPPGTGDVVVQAPTQVPGFLGDSVTLPCYLQVPNMEVTHVSQLTWARHGESGSMAVFHQ
TQGPSYSESKRLEFVAARLGAELRNASLRMFGLRVEDEGNYTCLFVTFPQGSRSVDIWLR
VLAKPQNTAEVQKVQLTGEPVPMARCVSTGGRPPAQITWHSDLGGMPNTSQVPGFLSGTV
TVTSLWILVPSSQVDGKNVTCKVEHESFEKPQLLTVNLTVYYPPEVSISGYDNNWYLGQN
EATLTCDARSNPEPTGYNWSTTMGPLPPFAVAQGAQLLIRPVDKPINTTLICNVTNALGA
RQAELTVQVKEGPPSEHSGISRN
(anti-PD-1 Ab VH(D100N)-CH1-N' hinge portion-linker-single-chain IL-12 mutant
heterodimer IL-12B (p40 E59A/F60A)-linker IL-12A (wt p35)-C' hinge portion-IgG1 Fc mutant1; VH is
underlined; hinge is bolded; linker is bolded and underlined; IL-12 subunits are italicized)
SEQ ID NO: 268
QVQLVESGGGVVQPGRSLRLDCKASGITFSNSGMHWVRQAPGKGLEWVAVIWYDGSKRYYADSVKGRF

[chemical structure]

CLVKDYFPEPVTVSWNSGALTSGVHTFPAVLQSSGLYSLSSVVTVPSSSLGTQTYICNVNHKPSNTKVDKK

[chemical structure]

DAGQYTCHKGGEVLSHSLLLLHKKEDGIWSTDILKDOKEPKNKTFLRCEAKNYSGRFTCWWLTTISTDLTFSVKSS
RGSSDPQGVTCGAATLSAERVRGDNKEYEYSVECQEDSACPAAEESLPIEVMVDAVHKLKYENYTSSFFIRDIIKPD
PPKNLQLKPLKNSRQVEVSWEYPDTWSTPHSYFSLTFCVQVQGKSKREKKDRVFTDKTSATVICRKNASISVRAQD
RYYSSSWSEWASVPCSGGGGSGGGGSGGGGSGGGGSGRNLPVATPDPGMFPCLHHSQNLLRAVSNMLQKAR
QTLEFYPCTSEEIDHEDITKDKTSTVEACLPLELTKNESCLNSRETSFITNGSCLASRKTSFMMALCLSSIYEDLKMY
QVEFKTMNAKLLMDPKROIFLDONMLAVIDELMQALNFNSETVPOKSSLEEPDFYKTKIKLCILLHAFRIRAVTID

[chemical structure]

[chemical structure]

[chemical structure]

NVFSCSVMHEALHNHYTQKSLSLSPGK
(anti-PD-1 Ab VH(D100G)-CH1-N' hinge portion-linker-single-chain IL-12 mutant
heterodimer IL-12B (p40 E59A/F60A)-linker IL-12A (wt p35)-C' hinge portion-IgG1 Fc mutant1; VH is
underlined; hinge is bolded; linker is bolded and underlined; IL-12 subunits are italicized)
SEQ ID NO: 269
QVQLVESGGGVVQPGRSLRLDCKASGITFSNSGMHWVRQAPGKGLEWVAVIWYDGSKRYYADSVKGRF

[chemical structure]

CLVKDYFPEPVTVSWNSGALTSGVHTFPAVLQSSGLYSLSSVVTVPSSSLGTQTYICNVNHKPSNTKVDKK

[chemical structure]

DAGQYTCHKGGEVLSHSLLLLHKKEDGIWSTDILKDOKEPKNKTFLRCEAKNYSGRFTCWWLTTISTDLTFSVKSS
RGSSDPQGVTCGAATLSAERVRGDNKEYEYSVECQEDSACPAAEESLPIEVMVDAVHKLKYENYTSSFFIRDIIKPD
PPKNLQLKPLKNSRQVEVSWEYPDTWSTPHSYFSLTFCVQVQGKSKREKKDRVFTDKTSATVICRKNASISVRAQD
RYYSSSWSEWASVPCSGGGGSGGGGSGGGGSGGGGSGRNLPVATPDPGMFPCLHHSQNLLRAVSNMLQKAR
QTLEFYPCTSEEIDHEDITKDKTSTVEACLPLELTKNESCLNSRETSFITNGSCLASRKTSFMMALCLSSIYEDLKMY
QVEFKTMNAKLLMDPKRQIFLDQNMLAVIDELMQALNFNSETVPQKSSLEEPDFYKTKIKLCILLHAFRIRAVTID

[chemical structure]

[chemical structure]

[chemical structure]

NVFSCSVMHEALHNHYTQKSLSLSPGK
(anti-PD-1 Ab VH(D100R)-CH1-N' hinge portion-linker-single-chain IL-12 mutant
heterodimer IL-12B (p40 E59A/F60A)-linker IL-12A (wt p35)-C' hinge portion-IgG1 Fc mutant1; VH is
underlined; hinge is bolded; linker is bolded and underlined; IL-12 subunits are italicized)
SEQ ID NO: 270
QVQLVESGGGVVQPGRSLRLDCKASGITFSNSGMHWVRQAPGKGLEWVAVIWYDGSKRYYADSVKGRF

[chemical structure]

CLVKDYFPEPVTVSWNSGALTSGVHTFPAVLQSSGLYSLSSVVTVPSSSLGTQTYICNVNHKPSNTKVDKK

[chemical structure]

DAGQYTCHKGGEVLSHSLLLLHKKEDGIWSTDILKDOKEPKNKTFLRCEAKNYSGRFTCWWLTTISTDLTFSVKSS
RGSSDPQGVTCGAATLSAERVRGDNKEYEYSVECQEDSACPAAEESLPIEVMVDAVHKLKYENYTSSFFIRDIIKPD
PPKNLQLKPLKNSROVEVSWEYPDTWSTPHSYFSLTFCVOVOGKSKREKKDRVFTDKTSATVICRKNASISVRAQD
RYYSSSWSEWASVPCSGGGGSGGGGSGGGGSGGGGSGRNLPVATPDPGMFPCLHHSONLLRAVSNMLQKAR
QTLEFYPCTSEEIDHEDITKDKTSTVEACLPLELTKNESCLNSRETSFITNGSCLASRKTSFMMALCLSSIYEDLKMY
QVEFKTMNAKLLMDPKRQIFLDQNMLAVIDELMQALNFNSETVPQKSSLEEPDFYKTKIKLCILLHAFRIRAVTID

[chemical structure]

[chemical structure]

[chemical structure]

NVFSCSVMHEALHNHYTQKSLSLSPGK
(anti-PD-1 Ab VH(N99G)-CH1-N' hinge portion-linker-single-chain IL-12 mutant
heterodimer IL-12B (p40 E59A/F60A)-linker IL-12A (wt p35)-C' hinge portion-IgG1 Fc mutant1; VH is
underlined; hinge is bolded; linker is bolded and underlined; IL-12 subunits are italicized)
SEQ ID NO: 271
QVQLVESGGGVVQPGRSLRLDCKASGITFSNSGMHWVRQAPGKGLEWVAVIWYDGSKRYYADSVKGRF

[chemical structure]

CLVKDYFPEPVTVSWNSGALTSGVHTFPAVLQSSGLYSLSSVVTVPSSSLGTQTYICNVNHKPSNTKVDKK

[chemical structure]

DAGQYTCHKGGEVLSHSLLLLHKKEDGIWSTDILKDOKEPKNKTFLRCEAKNYSGRFTCWWLTTISTDLTFSVKSS
RGSSDPQGVTCGAATLSAERVRGDNKEYEYSVECQEDSACPAAEESLPIEVMVDAVHKLKYENYTSSFFIRDIIKPD
PPKNLQLKPLKNSRQVEVSWEYPDTWSTPHSYFSLTFCVOVOGKSKREKKDRVFTDKTSATVICRKNASISVRAQD
RYYSSSWSEWASVPCSGGGGSGGGGSGGGGSGGGGSGRNLPVATPDPGMFPCLHHSONLLRAVSNMLQKAR
QTLEFYPCTSEEIDHEDITKDKTSTVEACLPLELTKNESCLNSRETSFITNGSCLASRKTSFMMALCLSSIYEDLKMY
QVEFKTMNAKLLMDPKRQIFLDQNMLAVIDELMQALNFNSETVPQKSSLEEPDFYKTKIKLCILLHAFRIRAVTID

[chemical structure]

[chemical structure]

[chemical structure]

NVFSCSVMHEALHNHYTQKSLSLSPGK
(anti-PD-1 Ab VH(N99A)-CH1-N' hinge portion-linker-single-chain IL-12 mutant
heterodimer IL-12B (p40 E59A/F60A)-linker IL-12A (wt p35)-C' hinge portion-IgG1 Fc mutant1; VH is
underlined; hinge is bolded; linker is bolded and underlined; IL-12 subunits are italicized)
SEQ ID NO: 272
QVQLVESGGGVVQPGRSLRLDCKASGITFSNSGMHWVRQAPGKGLEWVAVIWYDGSKRYYADSVKGRF

[chemical structure]

CLVKDYFPEPVTVSWNSGALTSGVHTFPAVLQSSGLYSLSSVVTVPSSSLGTQTYICNVNHKPSNTKVDKK

[chemical structure]

DAGQYTCHKGGEVLSHSLLLLHKKEDGIWSTDILKDOKEPKNKTFLRCEAKNYSGRFTCWWLTTISTDLTFSVKSS
RGSSDPQGVTCGAATLSAERVRGDNKEYEYSVECOEDSACPAAEESLPIEVMVDAVHKLKYENYTSSFFIRDIIKPD
PPKNLQLKPLKNSRQVEVSWEYPDTWSTPHSYFSLTFCVQVQGKSKREKKDRVFTDKTSATVICRKNASISVRAQD
RYYSSSWSEWASVPCSGGGGSGGGGSGGGGSGGGGSGRNLPVATPDPGMFPCLHHSONLLRAVSNMLQKAR
QTLEFYPCTSEEIDHEDITKDKTSTVEACLPLELTKNESCLNSRETSFITNGSCLASRKTSFMMALCLSSIYEDLKMY
QVEFKTMNAKLLMDPKRQIFLDONMLAVIDELMQALNFNSETVPQKSSLEEPDFYKTKIKLCILLHAFRIRAVTID

[chemical structure]

[chemical structure]

[chemical structure]

NVFSCSVMHEALHNHYTQKSLSLSPGK
(anti-PD-1 Ab VH(N99M)-CH1-N' hinge portion-linker-single-chain IL-12 mutant
heterodimer IL-12B (p40 E59A/F60A)-linker IL-12A (wt p35)-C' hinge portion-IgG1 Fc mutant1; VH is
underlined; hinge is bolded; linker is bolded and underlined; IL-12 subunits are italicized)
SEQ ID NO: 273
QVQLVESGGGVVQPGRSLRLDCKASGITFSNSGMHWVRQAPGKGLEWVAVIWYDGSKRYYADSVKGRF

[chemical structure]

GCLVKDYFPEPVTVSWNSGALTSGVHTFPAVLQSSGLYSLSSVVTVPSSSLGTQTYICNVNHKPSNTKVDK

[chemical structure]

GDAGQYTCHKGGEVLSHSLLLLHKKEDGIWSTDILKDOKEPKNKTFLRCEAKNYSGRFTCWWLTTISTDLTFSVK
SSRGSSDPQGVTCGAATLSAERVRGDNKEYEYSVECOEDSACPAAEESLPIEVMVDAVHKLKYENYTSSFFIRDIIK
PDPPKNLOLKPLKNSROVEVSWEYPDTWSTPHSYFSLTFCVOVOGKSKREKKDRVFTDKTSATVICRKNASISVRA
QDRYYSSSWSEWASVPCSGGGGSGGGGSGGGGSGGGGSGRNLPVATPDPGMFPCLHHSQNLLRAVSNMLQK
ARQTLEFYPCTSEEIDHEDITKDKTSTVEACLPLELTKNESCLNSRETSFITNGSCLASRKTSFMMALCLSSIYEDLK
MYQVEFKTMNAKLLMDPKRQIFLDQNMLAVIDELMQALNFNSETVPQKSSLEEPDFYKTKIKLCILLHAFRIRAVT

[chemical structure]

GVEVHNAKTKPREEQYNSTYRVVSVLTVLHQDWLNGKEYKCKVSNKALPAPIEKTISKAKGQPREPQVY

[chemical structure]

GNVFSCSVMHEALHNHYTQKSLSLSPGK
(human PD-L2 extracellular domain hinge portion-linker-single-chain IL-12 mutant
heterodimer IL-12B (p40 F60A)-linker IL-12A (wt p35)-C' hinge portion-IgG1 Fc mutant1; VH is
underlined; hinge is bolded; linker is bolded and underlined; IL-12 subunits are italicized)
SEQ ID NO: 274
LFTVTVPKELYIIEHGSNVTLECNFDTGSHVNLGAITASLQKVENDTSPHRERATLLEEQLPLGKASFHIPQV
QVRDEGQYQCIIIYGVAWDYKYLTLKVKASYRKINTHILKVPETDEVELTCQATGYPLAEVSWPNVSVPAN
TSHSRTPEGLYQVTSVLRLKPPPGRNFSCVFWNTHVRELTGSGIWELKKDVYVVELDWYPDAPGEMVVLTCD

[chemical structure]

TFLRCEAKNYSGRFTCWWLTTISTDLTFSVKSSRGSSDPQGVTCGAATLSAERVRGDNKEYEYSVECQEDSACPAA
EESLPIEVMVDAVHKLKYENYTSSFFIRDIIKPDPPKNLOLKPLKNSRQVEVSWEYPDTWSTPHSYFSLTFCVQVQG
KSKREKKDRVFTDKTSATVICRKNASISVRAQDRYYSSSWSEWASVPCSGGGGSGGGGSGGGGSGGGGSGRNL
PVATPDPGMFPCLHHSONLLRAVSNMLQKARQTLEFYPCTSEEIDHEDITKDKTSTVEACLPLELTKNESCLNSRE
TSFITNGSCLASRKTSFMMALCLSSIYEDLKMYQVEFKTMNAKLLMDPKRQIFLDQNMLAVIDELMQALNFNSET

[chemical structure]

[chemical structure]

[chemical structure]

TTPPVLDEDGSFALVSKLTVDKSRWQQGNVFSCSVMHEALHNHYTQKSLSLSPGK
(single-chain IL-12 mutant heterodimer IL-12B (p40 F60A)-linker-IL-12A (wt p35); linker
is bolded; IL-12 subunits are italicized)
SEQ ID NO: 275

[chemical structure]

LSHSLLLLHKKEDGIWSTDILKDOKEPKNKTFLRCEAKNYSGRFTCWWLTTISTDLTFSVKSSRGSSDPQGVTCGA
ATLSAERVRGDNKEYEYSVECQEDSACPAAEESLPIEVMVDAVHKLKYENYTSSFFIRDIIKPDPPKNLQLKPLKNS
RQVEVSWEYPDTWSTPHSYFSLTFCVQVQGKSKREKKDRVFTDKTSATVICRKNASISVRAQDRYYSSSWSEWASV
PCSGGGGSGGGGSGGGGSGGGGSGRNLPVATPDPGMFPCLHHSQNLLRAVSNMLQKARQTLEFYPCTSEEI
DHEDITKDKTSTVEACLPLELTKNESCLNSRETSFITNGSCLASRKTSFMMALCLSSIYEDLKMYQVEFKTMNAKLL
MDPKRQIFLDQNMLAVIDELMQALNFNSETVPQKSSLEEPDFYKTKIKLCILLHAFRIRAVTIDRVMSYLNAS
(human PD-L2 extracellular domain-linker-hinge portion-IgG1 Fc mutant1-linker-single-
chain IL-12 mutant heterodimer IL-12B (p40 F60A)-linker IL-12A (wt p35); VH is underlined; hinge is
bolded; linker is bolded and underlined; IL-12 subunits are italicized)
SEQ ID NO: 276
LFTVTVPKELYIIEHGSNVTLECNFDTGSHVNLGAITASLOKVENDTSPHRERATLLEEQLPLGKASFHIPQV
QVRDEGQYQCIIIYGVAWDYKYLTLKVKASYRKINTHILKVPETDEVELTCQATGYPLAEVSWPNVSVPAN

[chemical structure]

DTLMISRTPEVTCVVVDVSHEDPEVKFNWYVDGVEVHNAKTKPREEQYNSTYRVVSVLTVLHQDWLNGK

[chemical structure]

[chemical structure]

[chemical structure]

CHKGGEVLSHSLLLLHKKEDGIWSTDILKDOKEPKNKTFLRCEAKNYSGRFTCWWLTTISTDLTFSVKSSRGSSDP
QGVTCGAATLSAERVRGDNKEYEYSVECQEDSACPAAEESLPIEVMVDAVHKLKYENYTSSFFIRDIIKPDPPKNL
QLKPLKNSRQVEVSWEYPDTWSTPHSYFSLTFCVQVQGKSKREKKDRVFTDKTSATVICRKNASISVRAODRYYSSS
WSEWASVPCSGGGGSGGGGSGGGGSGGGGSGRNLPVATPDPGMFPCLHHSQNLLRAVSNMLQKARQTLEF
YPCTSEEIDHEDITKDKTSTVEACLPLELTKNESCLNSRETSFITNGSCLASRKTSFMMALCLSSIYEDLKMYQVEFK
TMNAKLLMDPKRQIFLDQNMLAVIDELMQALNFNSETVPQKSSLEEPDFYKTKIKLCILLHAFRIRAVTIDRVMSY
LNAS
(human PD-L1 extracellular domain mutant2 I54Q/E58M/R113T/M115L/S117A/G119K
extracellular domain-linker-single-chain IL-12 mutant heterodimer IL-12B (p40 E59A/F60A)-linker IL-12A
(wt p35)-hinge-IgG1 Fc mutant1; PD-L1 is underlined; linker is bolded and underlined; hinge is bolded; IL-
12 subunits are italicized)
SEQ ID NO: 277

[chemical structure]

[chemical structure]

EGYPKAEVIWTSSDHQVLSGKTTTTNSKREEKLFNVTSTLRINTTTNEIFYCTFRRLDPEENHTAELVIPELPL
AHPPNERGGGGSGGGIWELKKDVYVVELDWYPDAPGEMVVLTCDTPEEDGITWTLDQSSEVLGSGKTLTIQVK

[chemical structure]

VKSSRGSSDPQGVTCGAATLSAERVRGDNKEYEYSVECQEDSACPAAEESLPIEVMVDAVHKLKYENYTSSFFIRDI
IKPDPPKNLOLKPLKNSRQVEVSWEYPDTWSTPHSYFSLTFCVQVQGKSKREKKDRVFTDKTSATVICRKNASISV
RAQDRYYSSSWSEWASVPCSGGGGSGGGSGGGGSRNLPVATPDPGMFPCLHHSQNLLRAVSNMLQKARQTLE
FYPCTSEEIDHEDITKDKTSTVEACLPLELTKNESCLNSRETSFITNGSCLASRKTSFMMALCLSSIYEDLKMYQVEF
KTMNAKLLMDPKRQIFLDONMLAVIDELMQALNFNSETVPQKSSLEEPDFYKTKIKLCILLHAFRIRAVTIDRVMS

[chemical structure]

YVDGVEVHNAKTKPREEQYNSTYRVVSVLTVLHQDWLNGKEYKCKVSNKALPAPIEKTISKAKGQPREPQ

[chemical structure]

QQGNVFSCSVMHEALHNHYTQKSLSLSPGK
(human PD-L1 extracellular domain mutant7 I54Q/E58M/R113T/M115L/S117A
extracellular domain-linker-single-chain IL-12 mutant heterodimer IL-12B (p40 E59A/F60A)-linker IL-12A
(wt p35)-hinge-IgG1 Fc mutant1; PD-L1 is underlined; linker is bolded and underlined; hinge is bolded; IL-
12 subunits are italicized)
SEQ ID NO: 278

[chemical structure]

[chemical structure]

EGYPKAEVIWTSSDHQVLSGKTTTTNSKREEKLFNVTSTLRINTTTNEIFYCTFRRLDPEENHTAELVIPELPL
AHPPNERGGGGSGGGIWELKKDVYVVELDWYPDAPGEMVVLTCDTPEEDGITWTLDQSSEVLGSGKTLTIQVK

[chemical structure]

VKSSRGSSDPQGVTCGAATLSAERVRGDNKEYEYSVECQEDSACPAAEESLPIEVMVDAVHKLKYENYTSSFFIRDI
IKPDPPKNLOLKPLKNSROVEVSWEYPDTWSTPHSYFSLTFCVOVOGKSKREKKDRVFTDKTSATVICRKNASISV
RAQDRYYSSSWSEWASVPCSGGGGSGGGSGGGGSRNLPVATPDPGMFPCLHHSQNLLRAVSNMLQKARQTLE
FYPCTSEEIDHEDITKDKTSTVEACLPLELTKNESCLNSRETSFITNGSCLASRKTSFMMALCLSSIYEDLKMYQVEF
KTMNAKLLMDPKRQIFLDONMLAVIDELMQALNFNSETVPQKSSLEEPDFYKTKIKLCILLHAFRIRAVTIDRVMS

[chemical structure]

YVDGVEVHNAKTKPREEQYNSTYRVVSVLTVLHQDWLNGKEYKCKVSNKALPAPIEKTISKAKGQPREPQ

[chemical structure]

QQGNVFSCSVMHEALHNHYTQKSLSLSPGK
(human PD-L1 extracellular domain mutant2 154Q/E58M/R113T/M115L/S117A/G119K
extracellular domain-linker-hinge-IgG1 Fc mutant1-linker-single-chain IL-12 mutant heterodimer IL-12B
(p40 E59A/F60A)-linker IL-12A (wt p35); PD-L1 is underlined; linker is bolded and underlined; hinge is
bolded; IL-12 subunits are italicized)
SEQ ID NO: 279

[chemical structure]

[chemical structure]

EGYPKAEVIWTSSDHQVLSGKTTTTNSKREEKLFNVTSTLRINTTTNEIFYCTFRRLDPEENHTAELVIPELPL

[chemical structure]

NWYVDGVEVHNAKTKPREEQYNSTYRVVSVLTVLHQDWLNGKEYKCKVSNKALPAPIEKTISKAKGQPR

[chemical structure]

SRWQQGNVFSCSVMHEALHNHYTQKSLSLSPGKGGGGSGGGIWELKKDVYVVELDWYPDAPGEMVVLTCD

[chemical structure]

TFLRCEAKNYSGRFTCWWLTTISTDLTFSVKSSRGSSDPQGVTCGAATLSAERVRGDNKEYEYSVECQEDSACPAA
EESLPIEVMVDAVHKLKYENYTSSFFIRDIIKPDPPKNLOLKPLKNSROVEVSWEYPDTWSTPHSYFSLTFCVQVQG
KSKREKKDRVFTDKTSATVICRKNASISVRAQDRYYSSSWSEWASVPCSGGGGSGGGSGGGGSRNLPVATPDPG
MFPCLHHSONLLRAVSNMLQKARQTLEFYPCTSEEIDHEDITKDKTSTVEACLPLELTKNESCLNSRETSFITNGSC
LASRKTSFMMALCLSSIYEDLKMYQVEFKTMNAKLLMDPKRQIFLDQNMLAVIDELMQALNFNSETVPQKSSLEE
PDFYKTKIKLCILLHAFRIRAVTIDRVMSYLNAS
(human PD-L1 extracellular domain mutant7 I54Q/E58M/R113T/M115L/S117A
extracellular domain-linker-hinge-IgG1 Fc mutant1-linker-single-chain IL-12 mutant heterodimer IL-12B
(p40 E59A/F60A)-linker IL-12A (wt p35); PD-L1 is underlined; linker is bolded and underlined; hinge is
bolded; IL-12 subunits are italicized)
SEQ ID NO: 280

[chemical structure]

[chemical structure]

EGYPKAEVIWTSSDHQVLSGKTTTTNSKREEKLFNVTSTLRINTTTNEIFYCTFRRLDPEENHTAELVIPELPL

[chemical structure]

NWYVDGVEVHNAKTKPREEQYNSTYRVVSVLTVLHQDWLNGKEYKCKVSNKALPAPIEKTISKAKGQPR

[chemical structure]

SRWQQGNVFSCSVMHEALHNHYTQKSLSLSPGKGGGGSGGGIWELKKDVYVVELDWYPDAPGEMVVLTCD

[chemical structure]

TFLRCEAKNYSGRFTCWWLTTISTDLTFSVKSSRGSSDPQGVTCGAATLSAERVRGDNKEYEYSVECQEDSACPAA
EESLPIEVMVDAVHKLKYENYTSSFFIRDIIKPDPPKNLQLKPLKNSRQVEVSWEYPDTWSTPHSYFSLTFCVQVQG
KSKREKKDRVFTDKTSATVICRKNASISVRAQDRYYSSSWSEWASVPCSGGGGSGGGSGGGGSRNLPVATPDPG
MFPCLHHSONLLRAVSNMLQKARQTLEFYPCTSEEIDHEDITKDKTSTVEACLPLELTKNESCLNSRETSFITNGSC
LASRKTSFMMALCLSSIYEDLKMYQVEFKTMNAKLLMDPKRQIFLDQNMLAVIDELMQALNFNSETVPQKSSLEE
PDFYKTKIKLCILLHAFRIRAVTIDRVMSYLNAS
(human PD-L1 extracellular domain mutant2 154Q/E58M/R113T/M115L/S117A/G119K
extracellular domain-linker-hinge-IgG1 Fc mutant1; PD-L1 is underlined; linker is bolded and underlined;
hinge is bolded;
SEQ ID NO: 281

[chemical structure]

[chemical structure]

EGYPKAEVIWTSSDHQVLSGKTTTTNSKREEKLFNVTSTLRINTTTNEIFYCTFRRLDPEENHTAELVIPELPL

[chemical structure]

NWYVDGVEVHNAKTKPREEQYNSTYRVVSVLTVLHQDWLNGKEYKCKVSNKALPAPIEKTISKAKGQPR

[chemical structure]

SRWQQGNVFSCSVMHEALHNHYTQKSLSLSPGK
(human PD-L1 extracellular domain mutant7 I54Q/E58M/R113T/M115L/S117A
extracellular domain-linker-hinge-IgG1 Fc mutant1; PD-L1 is underlined; linker is bolded and underlined;
hinge is bolded;
SEQ ID NO: 282

[chemical structure]

[chemical structure]

EGYPKAEVIWTSSDHQVLSGKTTTTNSKREEKLFNVTSTLRINTTTNEIFYCTFRRLDPEENHTAELVIPELPL

[chemical structure]

NWYVDGVEVHNAKTKPREEQYNSTYRVVSVLTVLHQDWLNGKEYKCKVSNKALPAPIEKTISKAKGQPR

[chemical structure]

SRWQQGNVFSCSVMHEALHNHYTQKSLSLSPGK
(human PD-L1 extracellular domain mutant2 154Q/E58M/R113T/M115L/S117A/G119K
extracellular domain-linker-hinge-IgG1 Fc mutant2; PD-L1 is underlined; linker is bolded and underlined;
hinge is bolded;
SEQ ID NO: 283

[chemical structure]

[chemical structure]

EGYPKAEVIWTSSDHQVLSGKTTTTNSKREEKLFNVTSTLRINTTTNEIFYCTFRRLDPEENHTAELVIPELPL

[chemical structure]

FNWYVDGVEVHNAKTKPREEQYNSTYRVVSVLTVLHQDWLNGKEYKCKVSNKALPAPIEKTISKAKGQP

[chemical structure]

KSRWQQGNVFSCSVMHEALHNHYTQKSLSLSPGK
(human PD-L1 extracellular domain mutant7 154Q/E58M/R113T/M115L/S117A
extracellular domain-linker- hinge-IgG1 Fc mutant2; PD-L1 is underlined; linker is bolded and underlined;
hinge is bolded;
SEQ ID NO: 284

[chemical structure]

[chemical structure]

EGYPKAEVIWTSSDHQVLSGKTTTTNSKREEKLFNVTSTLRINTTTNEIFYCTFRRLDPEENHTAELVIPELPL

[chemical structure]

FNWYVDGVEVHNAKTKPREEQYNSTYRVVSVLTVLHQDWLNGKEYKCKVSNKALPAPIEKTISKAKGQP

[chemical structure]

KSRWQQGNVFSCSVMHEALHNHYTQKSLSLSPGK
(human PD-L1 extracellular domain mutant2 154Q/E58M/R113T/M115L/S117A/G119K
extracellular domain-linker- IL-2 mutant L18R/Q22E/R38D/K43E/E61R)-linker-hinge-IgG1 Fc mutant2;
PD-L1 is underlined; linker is bolded and underlined; hinge is bolded; IL-12 subunits are italicized
SEQ ID NO: 285

[chemical structure]

[chemical structure]

EGYPKAEVIWTSSDHQVLSGKTTTTNSKREEKLFNVTSTLRINTTTNEIFYCTFRRLDPEENHTAELVIPELPL

[chemical structure]

ELKPLEEVLNLAQSKNFHLRPRDLISNINVIVLELKGSETTFMCEYADETATIVEFLNRWITFCOSIISTLT

[chemical structure]

GVEVHNAKTKPREEQYNSTYRVVSVLTVLHQDWLNGKEYKCKVSNKALPAPIEKTISKAKGQPREPQVY

[chemical structure]

QGNVFSCSVMHEALHNHYTQKSLSLSPGK
(human PD-L1 extracellular domain mutant2 I54Q/E58M/R113T/M115L/S117A/G119K
extracellular domain-linker- IL-2 mutant R38D/K43E/E61R/Q126T)-linker-hinge-IgG1 Fc mutant2; PD-L1
is underlined; linker is bolded and underlined; hinge is bolded; IL-12 subunits are italicized
SEQ ID NO: 286

[chemical structure]

[chemical structure]

EGYPKAEVIWTSSDHQVLSGKTTTTNSKREEKLFNVTSTLRINTTTNEIFYCTFRRLDPEENHTAELVIPELPL

[chemical structure]

[chemical structure]

[chemical structure]

GVEVHNAKTKPREEQYNSTYRVVSVLTVLHQDWLNGKEYKCKVSNKALPAPIEKTISKAKGQPREPQVY

[chemical structure]

QGNVFSCSVMHEALHNHYTQKSLSLSPGK
(human PD-L1 extracellular domain mutant2 154Q/E58M/R113T/M115L/S117A/G119K
extracellular domain-linker-IL-2 mutant L18R/Q22E/R38D/K43E/E61R/Q126T)-linker-hinge-IgG1 Fc
mutant2; PD-L1 is underlined; linker is bolded and underlined; hinge is bolded; IL-12 subunits are italicized
SEQ ID NO: 287

[chemical structure]

[chemical structure]

EGYPKAEVIWTSSDHQVLSGKTTTTNSKREEKLFNVTSTLRINTTTNEIFYCTFRRLDPEENHTAELVIPELPL

[chemical structure]

[chemical structure]

[chemical structure]

GVEVHNAKTKPREEQYNSTYRVVSVLTVLHQDWLNGKEYKCKVSNKALPAPIEKTISKAKGQPREPQVY

[chemical structure]

QGNVFSCSVMHEALHNHYTQKSLSLSPGK
(human PD-L1 extracellular domain mutant2 154Q/E58M/R113T/M115L/S117A/G119K
extracellular domain-linker- IL-2 mutant L18R/Q22E/R38D/K43E/E61R/Q126T/S130R)-linker-hinge-IgG1
Fc mutant2; PD-L1 is underlined; linker is bolded and underlined; hinge is bolded; IL-12 subunits are
italicized
SEQ ID NO: 288

[chemical structure]

[chemical structure]

EGYPKAEVIWTSSDHQVLSGKTTTTNSKREEKLFNVTSTLRINTTTNEIFYCTFRRLDPEENHTAELVIPELPL

[chemical structure]

[chemical structure]

[chemical structure]

[chemical structure]

[chemical structure]

VMHEALHNHYTQKSLSLSPGK
(human PD-L1 extracellular domain mutant7 154Q/E58M/R113T/M115L/S117A/G119K
extracellular domain-linker-IL-2 mutant L18R/Q22E/R38D/K43E/E61R)-linker-hinge-IgG1 Fc mutant2; PD-
L1 is underlined; linker is bolded and underlined; hinge is bolded; IL-12 subunits are italicized
SEQ ID NO: 289

[chemical structure]

[chemical structure]

[chemical structure]

[chemical structure]

ELKPLEEVLNLAOSKNFHLRPRDLISNINVIVLELKGSETTFMCEYADETATIVEFLNRWITFCQSIISTLT

[chemical structure]

GVEVHNAKTKPREEQYNSTYRVVSVLTVLHQDWLNGKEYKCKVSNKALPAPIEKTISKAKGQPREPQVY

[chemical structure]

QGNVFSCSVMHEALHNHYTQKSLSLSPGK
(human PD-L1 extracellular domain mutant7 154Q/E58M/R113T/M115L/S117A
extracellular domain-linker-IL-2 mutant R38D/K43E/E61R/Q126T)-linker-hinge-IgG1 Fc mutant2; PD-L1 is
underlined; linker is bolded and underlined; hinge is bolded; IL-12 subunits are italicized
SEQ ID NO: 290

[chemical structure]

[chemical structure]

EGYPKAEVIWTSSDHQVLSGKTTTTNSKREEKLFNVTSTLRINTTTNEIFYCTFRRLDPEENHTAELVIPELPL

[chemical structure]

[chemical structure]

GVEVHNAKTKPREEQYNSTYRVVSVLTVLHQDWLNGKEYKCKVSNKALPAPIEKTISKAKGQPREPQVY

[chemical structure]

QGNVFSCSVMHEALHNHYTQKSLSLSPGK
(human PD-L1 extracellular domain mutant7 154Q/E58M/R113T/M115L/S117A
extracellular domain-linker- IL-2 mutant L18R/Q22E/R38D/K43E/E61R/Q126T)-linker-hinge-IgG1 Fc
mutant2; PD-L1 is underlined; linker is bolded and underlined; hinge is bolded; IL-12 subunits
are italicized
SEQ ID NO: 291

[chemical structure]

[chemical structure]

EGYPKAEVIWTSSDHQVLSGKTTTTNSKREEKLFNVTSTLRINTTTNEIFYCTFRRLDPEENHTAELVIPELPL

[chemical structure]

[chemical structure]

[chemical structure]

GVEVHNAKTKPREEQYNSTYRVVSVLTVLHQDWLNGKEYKCKVSNKALPAPIEKTISKAKGQPREPQVY

[chemical structure]

QGNVFSCSVMHEALHNHYTQKSLSLSPGK
(human PD-L1 extracellular domain mutant7 154Q/E58M/R113T/M115L/S117A
extracellular domain-linker-IL-2 mutant L18R/Q22E/R38D/K43E/E61R/Q126T/S130R)-linker-hinge-IgG1
Fc mutant2; PD-L1 is underlined; linker is bolded and underlined; hinge is bolded; IL-12 subunits are
italicized
SEQ ID NO: 292

[chemical structure]

[chemical structure]

EGYPKAEVIWTSSDHQVLSGKTTTTNSKREEKLFNVTSTLRINTTTNEIFYCTFRRLDPEENHTAELVIPELPL

[chemical structure]

[chemical structure]

[chemical structure]

[chemical structure]

[chemical structure]

VMHEALHNHYTQKSLSLSPGK
(human PD-L1 extracellular domain mutant7 154Q/E58M/R113T/M115L/S117A
extracellular domain-linker- IL-2 mutant L18R/Q22E/R38D/K43E/E61R/Q126T)-linker-hinge-IgG1 Fc
mutant2; PD-L1 is underlined; linker is bolded and underlined; hinge is bolded; IL-12 subunits
are italicized
SEQ ID NO: 291

[chemical structure]

[chemical structure]

EGYPKAEVIWTSSDHQVLSGKTTTTNSKREEKLFNVTSTLRINTTTNEIFYCTFRRLDPEENHTAELVIPELPL

[chemical structure]

[chemical structure]

[chemical structure]

GVEVHNAKTKPREEQYNSTYRVVSVLTVLHQDWLNGKEYKCKVSNKALPAPIEKTISKAKGQPREPQVY

[chemical structure]

QGNVFSCSVMHEALHNHYTQKSLSLSPGK
(human PD-L1 extracellular domain mutant7 I54Q/E58M/R113T/M115L/S117A
extracellular domain-linker-IL-2 mutant L18R/Q22E/R38D/K43E/E61RQ126T/S130R)-linker-hinge-IgG1 Fc
mutant2; PD-L1 is underlined; linker is bolded and underlined; hinge is bolded; IL-12 subunits
are italicized
SEQ ID NO: 292

[chemical structure]

[chemical structure]

EGYPKAEVIWTSSDHQVLSGKTTTTNSKREEKLFNVTSTLRINTTTNEIFYCTFRRLDPEENHTAELVIPELPL

[chemical structure]

[chemical structure]

[chemical structure]

[chemical structure]

[chemical structure]

VMHEALHNHYTQKSLSLSPGK
(human PD-L2 extracellular domain mutant2 S58V extracellular domain-linker-single-
chain IL-12 mutant heterodimer IL-12B (p40 E59A/F60A)-linker IL-12A (wt p35)-hinge-IgG1 Fc mutant1;
PD-L2 is underlined; linker is bolded and underlined; hinge is bolded; IL-12 subunits are italicized)
SEQ ID NO: 293

[chemical structure]

QVRDEGQYQCIIIYGVAWDYKYLTLKVKASYRKINTHILKVPETDEVELTCQATGYPLAEVSWPNVSVPAN
TSHSRTPEGLYQVTSVLRLKPPPGRNFSCVFWNTHVRELTLASIDLQSQMEPRTHPTGGGGSGGGIWELKK

[chemical structure]

LLHKKEDGIWSTDILKDOKEPKNKTFLRCEAKNYSGRFTCWWLTTISTDLTFSVKSSRGSSDPOGVTCGAATLSAE
RVRGDNKEYEYSVECQEDSACPAAEESLPIEVMVDAVHKLKYENYTSSFFIRDIIKPDPPKNLOLKPLKNSRQVEVS
WEYPDTWSTPHSYFSLTFCVQVQGKSKREKKDRVFTDKTSATVICRKNASISVRAQDRYYSSSWSEWASVPCSGGG
GSGGGSGGGGSRNLPVATPDPGMFPCLHHSONLLRAVSNMLQKARQTLEFYPCTSEEIDHEDITKDKTSTVEAC
LPLELTKNESCLNSRETSFITNGSCLASRKTSFMMALCLSSIYEDLKMYQVEFKTMNAKLLMDPKRQIFLDQNMLA
VIDELMOALNFNSETVPQKSSLEEPDFYKTKIKLCILLHAFRIRAVTIDRVMSYLNASGGGGSGGGDKTHTCPPC

[chemical structure]

[chemical structure]

[chemical structure]

KSLSLSPGK
(human PD-L2 extracellular domain mutant4 T56V/S58V/Q60L extracellular domain-
linker-single-chain IL-12 mutant heterodimer IL-12B (p40 E59A/F60A)-linker IL-12A (wt p35)-hinge-IgG1
Fc mutant1; PD-L2 is underlined; linker is bolded and underlined; hinge is bolded; IL-12 subunits are
italicized)
SEQ ID NO: 294

[chemical structure]

VQVRDEGQYQCIIIYGVAWDYKYLTLKVKASYRKINTHILKVPETDEVELTCQATGYPLAEVSWPNVSVPA
NTSHSRTPEGLYQVTSVLRLKPPPGRNFSCVFWNTHVRELTLASIDLQSQMEPRTHPTGGGGSGGGIWELK

[chemical structure]

LLLHKKEDGIWSTDILKDOKEPKNKTFLRCEAKNYSGRFTCWWLTTISTDLTFSVKSSRGSSDPQGVTCGAATLSA
ERVRGDNKEYEYSVECOEDSACPAAEESLPIEVMVDAVHKLKYENYTSSFFIRDIIKPDPPKNLOLKPLKNSRQVEV
SWEYPDTWSTPHSYFSLTFCVQVQGKSKREKKDRVFTDKTSATVICRKNASISVRAQDRYYSSSWSEWASVPCSGG
GGSGGGSGGGGSRNLPVATPDPGMFPCLHHSQNLLRAVSNMLQKARQTLEFYPCTSEEIDHEDITKDKTSTVE
ACLPLELTKNESCLNSRETSFITNGSCLASRKTSFMMALCLSSIYEDLKMYQVEFKTMNAKLLMDPKRQIFLDQNM
LAVIDELMQALNFNSETVPQKSSLEEPDFYKTKIKLCILLHAFRIRAVTIDRVMSYLNASGGGGSGGGDKTHTCP

[chemical structure]

[chemical structure]

[chemical structure]

TQKSLSLSPGK
(human PD-L2 extracellular domain mutant2 S58V extracellular domain-linker-hinge-IgG1
Fc mutant1-linker-single-chain IL-12 mutant heterodimer IL-12B (p40 E59A/F60A)-linker IL-12A (wt p35);
PD-L2 is underlined; linker is bolded and underlined; hinge is bolded; IL-12 subunits are italicized)
SEQ ID NO: 295

[chemical structure]

QVRDEGQYQCIIIYGVAWDYKYLTLKVKASYRKINTHILKVPETDEVELTCQATGYPLAEVSWPNVSVPAN
TSHSRTPEGLYQVTSVLRLKPPPGRNFSCVFWNTHVRELTLASIDLQSQMEPRTHPTGGGGSGGGDKTHT

[chemical structure]

[chemical structure]

[chemical structure]

HYTQKSLSLSPGKGGGGSGGGIWELKKDVYVVELDWYPDAPGEMVVLTCDTPEEDGITWTLDQSSEVLGSGK

[chemical structure]

STDLTFSVKSSRGSSDPQGVTCGAATLSAERVRGDNKEYEYSVECQEDSACPAAEESLPIEVMVDAVHKLKYENYT
SSFFIRDIIKPDPPKNLOLKPLKNSRQVEVSWEYPDTWSTPHSYFSLTFCVQVQGKSKREKKDRVFTDKTSATVICR
KNASISVRAQDRYYSSSWSEWASVPCSGGGGSGGGSGGGGSRNLPVATPDPGMFPCLHHSQNLLRAVSNMLQK
ARQTLEFYPCTSEEIDHEDITKDKTSTVEACLPLELTKNESCLNSRETSFITNGSCLASRKTSFMMALCLSSIYEDLK
MYQVEFKTMNAKLLMDPKRQIFLDQNMLAVIDELMQALNFNSETVPQKSSLEEPDFYKTKIKLCILLHAFRIRAVT
IDRVMSYLNAS
(human PD-L2 extracellular domain mutant4 T56V/S58V/Q60L extracellular domain-
linker- hinge-IgG1 Fc mutant1- linker-single-chain IL-12 mutant heterodimer IL-12B (p40 E59A/F60A)-
linker IL-12A (wt p35); PD-L2 is underlined; linker is bolded and underlined; hinge is bolded;
IL-12 subunits are italicized)
SEQ ID NO: 296

[chemical structure]

VQVRDEGQYQCIIIYGVAWDYKYLTLKVKASYRKINTHILKVPETDEVELTCOATGYPLAEVSWPNVSVPA
NTSHSRTPEGLYQVTSVLRLKPPPGRNFSCVFWNTHVRELTLASIDLQSQMEPRTHPTGGGGSGGGDKTH

[chemical structure]

[chemical structure]

[chemical structure]

NHYTQKSLSLSPGKGGGGSGGGIWELKKDVYVVELDWYPDAPGEMVVLTCDTPEEDGITWTLDOSSEVLGSG

[chemical structure]

TISTDLTFSVKSSRGSSDPOGVTCGAATLSAERVRGDNKEYEYSVECOEDSACPAAEESLPIEVMVDAVHKLKYENY
TSSFFIRDIIKPDPPKNLOLKPLKNSROVEVSWEYPDTWSTPHSYFSLTFCVOVOGKSKREKKDRVFTDKTSATVIC
RKNASISVRAQDRYYSSSWSEWASVPCSGGGGSGGGSGGGGSRNLPVATPDPGMFPCLHHSQNLLRAVSNMLQ
KARQTLEFYPCTSEEIDHEDITKDKTSTVEACLPLELTKNESCLNSRETSFITNGSCLASRKTSFMMALCLSSIYEDL
KMYQVEFKTMNAKLLMDPKRQIFLDQNMLAVIDELMQALNFNSETVPQKSSLEEPDFYKTKIKLCILLHAFRIRA
VTIDRVMSYLNAS
(human PD-L2 extracellular domain mutant2 S58V extracellular domain-linker-hinge-IgG1
Fc mutant1; PD-L2 is underlined; linker is bolded and underlined; hinge is bolded;
SEQ ID NO: 297

[chemical structure]

QVRDEGQYQCIIIYGVAWDYKYLTLKVKASYRKINTHILKVPETDEVELTCQATGYPLAEVSWPNVSVPAN
TSHSRTPEGLYQVTSVLRLKPPPGRNFSCVFWNTHVRELTLASIDLQSQMEPRTHPTGGGGSGGGDKTHT

[chemical structure]

[chemical structure]

[chemical structure]

HYTQKSLSLSPGK
(human PD-L2 extracellular domain mutant4 T56V/S58V/Q60L extracellular domain-
linker-hinge-IgG1 Fc mutant1; PD-L2 is underlined; linker is bolded and underlined; hinge is bolded;
SEQ ID NO: 298

[chemical structure]

VQVRDEGQYQCIIIYGVAWDYKYLTLKVKASYRKINTHILKVPETDEVELTCQATGYPLAEVSWPNVSVPA
NTSHSRTPEGLYQVTSVLRLKPPPGRNFSCVFWNTHVRELTLASIDLQSQMEPRTHPTGGGGSGGGDKTH

[chemical structure]

[chemical structure]

[chemical structure]

NHYTQKSLSLSPGK
(human PD-L2 extracellular domain mutant2 S58V extracellular domain-linker-hinge-IgG1
Fc mutant2; PD-L2 is underlined; linker is bolded and underlined; hinge is bolded;
SEQ ID NO: 299

[chemical structure]

QVRDEGQYQCIIIYGVAWDYKYLTLKVKASYRKINTHILKVPETDEVELTCQATGYPLAEVSWPNVSVPAN
TSHSRTPEGLYQVTSVLRLKPPPGRNFSCVFWNTHVRELTLASIDLQSQMEPRTHPTGGGGSGGGDKTHT

[chemical structure]

[chemical structure]

[chemical structure]

HYTQKSLSLSPGK
(human PD-L2 mutant4 T56V/S58V/Q60L extracellular domain-linker- hinge-IgG1 Fc
mutant2; PD-L2 is underlined; linker is bolded and underlined; hinge is bolded;
SEQ ID NO: 300

[chemical structure]

VQVRDEGQYQCIIIYGVAWDYKYLTLKVKASYRKINTHILKVPETDEVELTCQATGYPLAEVSWPNVSVPA
NTSHSRTPEGLYQVTSVLRLKPPPGRNFSCVFWNTHVRELTLASIDLQSQMEPRTHPTGGGGSGGGDKTH

[chemical structure]

[chemical structure]

[chemical structure]

NHYTQKSLSLSPGK
(human PD-L2 extracellular domain mutant2 S58V extracellular domain-linker-IL-2
mutant L18R/Q22E/R38D/K43E/E61R)-linker-hinge-IgG1 Fc mutant2; PD-L2 is underlined; linker is bolded
and underlined; hinge is bolded; IL-12 subunits are italicized
SEQ ID NO: 301

[chemical structure]

QVRDEGQYQCIIIYGVAWDYKYLTLKVKASYRKINTHILKVPETDEVELTCQATGYPLAEVSWPNVSVPAN
TSHSRTPEGLYQVTSVLRLKPPPGRNFSCVFWNTHVRELTLASIDLQSQMEPRTHPTGGGSGAPTSSSTKKT

[chemical structure]

[chemical structure]

SVFLFPPKPKDTLMISRTPEVTCVVVDVSHEDPEVKFNWYVDGVEVHNAKTKPREEQYNSTYRVVSVLTV

[chemical structure]

[chemical structure]

(human PD-L2 extracellular domain mutant2 S58V extracellular domain-linker-IL-2
mutant R38D/K43E/E61R/Q126T)-linker-hinge-IgG1 Fc mutant2; PD-L2 is underlined; linker is bolded and
underlined; hinge is bolded; IL-12 subunits are italicized
SEQ ID NO: 302

[chemical structure]

QVRDEGQYQCIIIYGVAWDYKYLTLKVKASYRKINTHILKVPETDEVELTCQATGYPLAEVSWPNVSVPAN
TSHSRTPEGLYQVTSLRLKPPPGRNFSCVFWNTHVRELTLASIDLQSQMEPRTHPTGGGSGAPTSSSTKKTQL

[chemical structure]

[chemical structure]

FLFPPKPKDTLMISRTPEVTCVVVDVSHEDPEVKFNWYVDGVEVHNAKTKPREEQYNSTYRVVSVLTVLH

[chemical structure]

[chemical structure]

(human PD-L2 extracellular domain mutant2 S58V extracellular domain-linker-IL-2
mutant L18R/Q22E/R38D/K43E/E61R/Q126T)-linker-hinge-IgG1 Fc mutant2; PD-L2 is underlined; linker is
bolded and underlined; hinge is bolded; IL-12 subunits are italicized
SEQ ID NO: 303

[chemical structure]

QVRDEGQYQCIIIYGVAWDYKYLTLKVKASYRKINTHILKVPETDEVELTCQATGYPLAEVSWPNVSVPAN
TSHSRTPEGLYQVTSLRLKPPPGRNFSCVFWNTHVRELTLASIDLQSQMEPRTHPTGGGSGAPTSSSTKKTQL

[chemical structure]

[chemical structure]

FLFPPKPKDTLMISRTPEVTCVVVDVSHEDPEVKFNWYVDGVEVHNAKTKPREEQYNSTYRVVSVLTVLH

[chemical structure]

[chemical structure]

(human PD-L2 extracellular domain mutant2 S58V extracellular domain-linker-IL-2
mutant R38D/K43E/E61R)(L18R/Q22E/Q126T/S130R)-linker-hinge-IgG1 Fc mutant2; PD-L2 is underlined;
linker is bolded and underlined; hinge is bolded; IL-12 subunits are italicized
SEQ ID NO: 304

[chemical structure]

QVRDEGQYQCIIIYGVAWDYKYLTLKVKASYRKINTHILKVPETDEVELTCQATGYPLAEVSWPNVSVPAN
TSHSRTPEGLYQVTSLRLKPPPGRNFSCVFWNTHVRELTLASIDLQSQMEPRTHPTGGGSGAPTSSSTKKTQL

[chemical structure]

[chemical structure]

FLFPPKPKDTLMISRTPEVTCVVVDVSHEDPEVKFNWYVDGVEVHNAKTKPREEQYNSTYRVVSVLTVLH

[chemical structure]

[chemical structure]

PPVLDSDGSFFLYSKLTVDKSRWQQGNVFSCSVMHEALHNHYTQKSLSLSPGK
(human PD-L2 extracellular domain mutant4 T56V/S58V/Q60L extracellular domain-
linker-IL-2 mutant L18R/Q22E/R38D/K43E/E61R)-linker-hinge-IgG1 Fc mutant2; PD-L2 is underlined;
linker is bolded and underlined; hinge is bolded; IL-12 subunits are italicized
SEQ ID NO: 305

[chemical structure]

VQVRDEGQYQCIIIYGVAWDYKYLTLKVKASYRKINTHILKVPETDEVELTCQATGYPLAEVSWPNVSVPA
NTSHSRTPEGLYQVTSVLRLKPPPGRNFSCVFWNTHVRELTLASIDLQSQMEPRTHPTGGGSGAPTSSSTKK

[chemical structure]

[chemical structure]

PSVFLFPPKPKDTLMISRTPEVTCVVVDVSHEDPEVKFNWYVDGVEVHNAKTKPREEQYNSTYRVVSVLT

[chemical structure]

[chemical structure]

(human PD-L2 extracellular domain mutant4 T56V/S58V/Q60L extracellular domain-
linker-IL-2 mutant R38D/K43E/E61R/Q126T)-linker-hinge-IgG1 Fc mutant2; PD-L2 is underlined; linker is
bolded and underlined; hinge is bolded; IL-12 subunits are italicized
SEQ ID NO: 306

[chemical structure]

VQVRDEGQYQCIIIYGVAWDYKYLTLKVKASYRKINTHILKVPETDEVELTCQATGYPLAEVSWPNVSVPA
NTSHSRTPEGLYQVTSVLRLKPPPGRNFSCVFWNTHVRELTLASIDLQSQMEPRTHPTGGGSGAPTSSSTKK

[chemical structure]

[chemical structure]

PSVFLFPPKPKDTLMISRTPEVTCVVVDVSHEDPEVKFNWYVDGVEVHNAKTKPREEQYNSTYRVVSVLT

[chemical structure]

[chemical structure]

(human PD-L2 mutant4 T56V/S58V/Q60L extracellular domain-linker-IL-2 mutant
L18R/Q22E/R38D/K43E/E61R/Q126T)-linker-hinge-IgG1 Fc mutant2; PD-L2 is underlined; linker is bolded
and underlined; hinge is bolded; IL-12 subunits are italicized
SEQ ID NO: 307

[chemical structure]

VQVRDEGQYQCIIIYGVAWDYKYLTLKVKASYRKINTHILKVPETDEVELTCQATGYPLAEVSWPNVSVPA
NTSHSRTPEGLYQVTSVLRLKPPPGRNFSCVFWNTHVRELTLASIDLQSQMEPRTHPTGGGSGAPTSSSTKK

[chemical structure]

[chemical structure]

PSVFLFPPKPKDTLMISRTPEVTCVVVDVSHEDPEVKFNWYVDGVEVHNAKTKPREEQYNSTYRVVSVLT

[chemical structure]

[chemical structure]

(human PD-L2 mutant4 T56V/S58V/Q60L extracellular domain-linker-IL-2 mutant
L18R/Q22E/R38D/K43E/E61R/Q126T/S130R)-linker-hinge-IgG1 Fc mutant2; PD-L2 is underlined; linker is
bolded and underlined; hinge is bolded; IL-12 subunits are italicized
SEQ ID NO: 308

[chemical structure]

VQVRDEGQYQCIIIYGVAWDYKYLTLKVKASYRKINTHILKVPETDEVELTCQATGYPLAEVSWPNVSVPA
NTSHSRTPEGLYQVTSVLRLKPPPGRNFSCVFWNTHVRELTLASIDLQSQMEPRTHPTGGGSGAPTSSSTKK

[chemical structure]

[chemical structure]

GPSVFLFPPKPKDTLMISRTPEVTCVVVDVSHEDPEVKFNWYVDGVEVHNAKTKPREEQYNSTYRVVSVL

[chemical structure]

[chemical structure]

K
(human CD155 extracellular domain-linker-single-chain IL-12 mutant heterodimer IL-12B
(p40 E59A/F60A)-linker IL-12A (wt p35)-hinge-IgG1 Fc mutant1; CD155 is underlined; linker is bolded and
underlined; hinge is bolded; IL-12 subunits are italicized)
SEQ ID NO: 309
WPPPGTGDVVVQAPTQVPGFLGDSVTLPCYLQVPNMEVTHVSQLTWARHGESGSMAVFHQTOGPSYSES
KRLEFVAARLGAELRNASLRMFGLRVEDEGNYTCLFVTFPQGSRSVDIWLRVLAKPQNTAEVQKVQLTGE
PVPMARCVSTGGRPPAQITWHSDLGGMPNTSQVPGFLSGTVTVTSLWILVPSSQVDGKNVTCKVEHESFEK
PQLLTVNLTVYYPPEVSISGYDNNWYLGQNEATLTCDARSNPEPTGYNWSTTMGPLPPFAVAQGAQLLIRP
VDKPINTTLICNVTNALGARQAELTVQVKEGPPSEHSGISRNGGGGSGGGIWELKKDVYVVELDWYPDAPG

[chemical structure]

DQKEPKNKTFLRCEAKNYSGRFTCWWLTTISTDLTFSVKSSRGSSDPOGVTCGAATLSAERVRGDNKEYEYSVEC
QEDSACPAAEESLPIEVMVDAVHKLKYENYTSSFFIRDIIKPDPPKNLOLKPLKNSRQVEVSWEYPDTWSTPHSYFS
LTFCVQVQGKSKREKKDRVFTDKTSATVICRKNASISVRAQDRYYSSSWSEWASVPCSGGGGSGGGSGGGGSRN
LPVATPDPGMFPCLHHSONLLRAVSNMLQKARQTLEFYPCTSEEIDHEDITKDKTSTVEACLPLELTKNESCLNSR
ETSFITNGSCLASRKTSFMMALCLSSIYEDLKMYQVEFKTMNAKLLMDPKRQIFLDONMLAVIDELMQALNENSE

[chemical structure]

FPPKPKDTLMISRTPEVTCVVVDVSHEDPEVKFNWYVDGVEVHNAKTKPREEQYNSTYRVVSVLTVLHQD

[chemical structure]

[chemical structure]

(human CD155 extracellular domain-linker-hinge-IgG1 Fc mutant1-linker-single-chain IL-
12 mutant heterodimer IL-12B (p40 E59A/F60A)-linker IL-12A (wt p35); CD155 is underlined; linker is
bolded and underlined; hinge is bolded; IL-12 subunits are italicized)
SEQ ID NO: 310
WPPPGTGDVVVQAPTQVPGFLGDSVTLPCYLQVPNMEVTHVSQLTWARHGESGSMAVFHQTQGPSYSES
KRLEFVAARLGAELRNASLRMFGLRVEDEGNYTCLFVTFPQGSRSVDIWLRVLAKPONTAEVQKVQLTGE
PVPMARCVSTGGRPPAQITWHSDLGGMPNTSQVPGFLSGTVTVTSLWILVPSSQVDGKNVTCKVEHESFEK
PQLLTVNLTVYYPPEVSISGYDNNWYLGQNEATLTCDARSNPEPTGYNWSTTMGPLPPFAVAQGAQLLIRP
VDKPINTTLICNVTNALGARQAELTVQVKEGPPSEHSGISRN

[chemical structure]

[chemical structure]

[chemical structure]

NVFSCSVMHEALHNHYTQKSLSLSPGKGGGGSGGGIWELKKDVYVVELDWYPDAPGEMVVLTCDTPEEDGI

[chemical structure]

KNYSGRFTCWWLTTISTDLTFSVKSSRGSSDPQGVTCGAATLSAERVRGDNKEYEYSVECQEDSACPAAEESLPIEV
MVDAVHKLKYENYTSSFFIRDIIKPDPPKNLOLKPLKNSROVEVSWEYPDTWSTPHSYFSLTFCVQVQGKSKREKK
DRVFTDKTSATVICRKNASISVRAQDRYYSSSWSEWASVPCSGGGGSGGGSGGGGSRNLPVATPDPGMFPCLHH
SQNLLRAVSNMLQKARQTLEFYPCTSEEIDHEDITKDKTSTVEACLPLELTKNESCLNSRETSFITNGSCLASRKTSF
MMALCLSSIYEDLKMYQVEFKTMNAKLLMDPKRQIFLDQNMLAVIDELMQALNFNSETVPQKSSLEEPDFYKTKI
KLCILLHAFRIRAVTIDRVMSYLNAS
(human CD155 extracellular domain-linker-hinge-IgG1 Fc mutant1; CD155 is underlined;
linker is bolded and underlined; hinge is bolded;
SEQ ID NO: 311
WPPPGTGDVVVQAPTQVPGFLGDSVTLPCYLQVPNMEVTHVSQLTWARHGESGSMAVFHQTQGPSYSES
KRLEFVAARLGAELRNASLRMFGLRVEDEGNYTCLFVTFPQGSRSVDIWLRVLAKPQNTAEVQKVQLTGE
PVPMARCVSTGGRPPAQITWHSDLGGMPNTSQVPGFLSGTVTVTSLWILVPSSQVDGKNVTCKVEHESFEK
PQLLTVNLTVYYPPEVSISGYDNNWYLGQNEATLTCDARSNPEPTGYNWSTTMGPLPPFAVAQGAQLLIRP

[chemical structure]

FLFPPKPKDTLMISRTPEVTCVVVDVSHEDPEVKFNWYVDGVEVHNAKTKPREEQYNSTYRVVSVLTVLH

[chemical structure]

[chemical structure]

(human CD155 extracellular domain-linker-hinge-IgG1 Fc mutant2; CD155 is underlined;
linker is bolded and underlined; hinge is bolded;
SEQ ID NO: 312
WPPPGTGDVVVQAPTQVPGFLGDSVTLPCYLQVPNMEVTHVSQLTWARHGESGSMAVFHQTQGPSYSES
KRLEFVAARLGAELRNASLRMFGLRVEDEGNYTCLFVTFPQGSRSVDIWLRVLAKPONTAEVQKVQLTGE
PVPMARCVSTGGRPPAQITWHSDLGGMPNTSQVPGFLSGTVTVTSLWILVPSSQVDGKNVTCKVEHESFEK
PQLLTVNLTVYYPPEVSISGYDNNWYLGONEATLTCDARSNPEPTGYNWSTTMGPLPPFAVAQGAQLLIRP

[chemical structure]

VFLFPPKPKDTLMISRTPEVTCVVVDVSHEDPEVKFNWYVDGVEVHNAKTKPREEQYNSTYRVVSVLTVL

[chemical structure]

[chemical structure]

(human CD155 extracellular domain-linker- IL-2 mutant L18R/Q22E/R38D/K43E/E61R)-
linker-hinge-IgG1 Fc mutant2; CD155 is underlined; linker is bolded and underlined; hinge is bolded;
IL-12 subunits are italicized
SEQ ID NO: 313
WPPPGTGDVVVQAPTQVPGFLGDSVTLPCYLQVPNMEVTHVSQLTWARHGESGSMAVFHQTQGPSYSES
KRLEFVAARLGAELRNASLRMFGLRVEDEGNYTCLFVTFPQGSRSVDIWLRVLAKPQNTAEVQKVQLTGE
PVPMARCVSTGGRPPAQITWHSDLGGMPNTSQVPGFLSGTVTVTSLWILVPSSQVDGKNVTCKVEHESFEK
PQLLTVNLTVYYPPEVSISGYDNNWYLGQNEATLTCDARSNPEPTGYNWSTTMGPLPPFAVAQGAQLLIRP

[chemical structure]

[chemical structure]

[chemical structure]

RTPEVTCVVVDVSHEDPEVKFNWYVDGVEVHNAKTKPREEQYNSTYRVVSVLTVLHQDWLNGKEYKCK

[chemical structure]

[chemical structure]

(human CD155 extracellular domain-linker-IL-2 mutant R38D/K43E/E61R/Q126T)-linker-
hinge-IgG1 Fc mutant2; CD155 is underlined; linker is bolded and underlined; hinge is bolded; IL-12
subunits are italicized
SEQ ID NO: 314
WPPPGTGDVVVQAPTQVPGFLGDSVTLPCYLQVPNMEVTHVSQLTWARHGESGSMAVFHQTOGPSYSES
KRLEFVAARLGAELRNASLRMFGLRVEDEGNYTCLFVTFPQGSRSVDIWLRVLAKPQNTAEVQKVQLTGE
PVPMARCVSTGGRPPAQITWHSDLGGMPNTSQVPGFLSGTVTVTSLWILVPSSQVDGKNVTCKVEHESFEK
PQLLTVNLTVYYPPEVSISGYDNNWYLGQNEATLTCDARSNPEPTGYNWSTTMGPLPPFAVAQGAQLLIRP
VDKPINTTLICNVTNALGARQAELTVQVKEGPPSEHSGISRNGGGSGAPTSSSTKKTQLQLEHLLLDLQMILN

[chemical structure]

[chemical structure]

RTPEVTCVVVDVSHEDPEVKFNWYVDGVEVHNAKTKPREEQYNSTYRVVSVLTVLHQDWLNGKEYKCK

[chemical structure]

[chemical structure]

(human CD155 extracellular domain-linker-IL-2 mutant
L18R/Q22E/R38D/K43E/E61R/Q126T)-linker-hinge-IgG1 Fc mutant2; CD155 is underlined; linker is bolded
and underlined; hinge is bolded; IL-12 subunits are italicized
SEQ ID NO: 315
WPPPGTGDVVVQAPTQVPGFLGDSVTLPCYLQVPNMEVTHVSQLTWARHGESGSMAVFHQTQGPSYSES
KRLEFVAARLGAELRNASLRMFGLRVEDEGNYTCLFVTFPQGSRSVDIWLRVLAKPONTAEVQKVQLTGE
PVPMARCVSTGGRPPAQITWHSDLGGMPNTSQVPGFLSGTVTVTSLWILVPSSQVDGKNVTCKVEHESFEK
PQLLTVNLTVYYPPEVSISGYDNNWYLGQNEATLTCDARSNPEPTGYNWSTTMGPLPPFAVAQGAQLLIRP

[chemical structure]

[chemical structure]

[chemical structure]

RTPEVTCVVVDVSHEDPEVKFNWYVDGVEVHNAKTKPREEQYNSTYRVVSVLTVLHQDWLNGKEYKCK

[chemical structure]

[chemical structure]

(human CD155 extracellular domain-linker- IL-2 mutant
L18R/Q22E/R38D/K43E/E61RQ126T/S130R)-linker-hinge-IgG1 Fc mutant2; CD155 is underlined; linker is
bolded and underlined; hinge is bolded; IL-12 subunits are italicized
SEQ ID NO: 316
WPPPGTGDVVVQAPTQVPGFLGDSVTLPCYLQVPNMEVTHVSQLTWARHGESGSMAVFHQTQGPSYSES
KRLEFVAARLGAELRNASLRMFGLRVEDEGNYTCLFVTFPQGSRSVDIWLRVLAKPQNTAEVQKVQLTGE
PVPMARCVSTGGRPPAQITWHSDLGGMPNTSQVPGFLSGTVTVTSLWILVPSSQVDGKNVTCKVEHESFEK
PQLLTVNLTVYYPPEVSISGYDNNWYLGQNEATLTCDARSNPEPTGYNWSTTMGPLPPFAVAQGAQLLIRP

[chemical structure]

[chemical structure]

[chemical structure]

RTPEVTCVVVDVSHEDPEVKFNWYVDGVEVHNAKTKPREEQYNSTYRVVSVLTVLHQDWLNGKEYKCK

[chemical structure]

[chemical structure]

(human PD-L1 extracellular domain mutant2 154Q/E58M/R113T/M115L/S117A/G119K
extracellular domain-linker-single-chain mutant homodimer IFN-Y (A23V/A23V)-linker hinge-IgG1 Fc
mutant1; PD-L1 is underlined; linker is bolded and underlined; hinge is bolded; IFN-y is italicized)
SEQ ID NO: 317

[chemical structure]

[chemical structure]

EGYPKAEVIWTSSDHQVLSGKTTTTNSKREEKLFNVTSTLRINTTTNEIFYCTFRRLDPEENHTAELVIPELPL

[chemical structure]

NFKDDOSIQKSVETIKEDMNVKFFNSNKKKRDDFEKLTNYSVTDLNVORKAIHELIQVMAELSPAAKTGKRKRSQ

[chemical structure]

SQIVSFYFKLFKNFKDDOSIQKSVETIKEDMNVKFFNSNKKKRDDFEKLTNYSVTDLNVORKAIHELIQVMAELSP

[chemical structure]

SHEDPEVKFNWYVDGVEVHNAKTKPREEQYNSTYRVVSVLTVLHQDWLNGKEYKCKVSNKALPAPIEKT

[chemical structure]

[chemical structure]

(human PD-L1 extracellular domain mutant7 154Q/E58M/R113T/M115L/S117A
extracellular domain-linker- single-chain mutant homodimer IFN-γ (A23V/A23V)-linker hinge-IgG1 Fc
mutant1; PD-L1 is underlined; linker is bolded and underlined; hinge is bolded; IFN-γ is italicized)
SEQ ID NO: 318

[chemical structure]

[chemical structure]

EGYPKAEVIWTSSDHQVLSGKTTTTNSKREEKLFNVTSTLRINTTTNEIFYCTFRRLDPEENHTAELVIPELPL

[chemical structure]

NFKDDOSIQKSVETIKEDMNVKFFNSNKKKRDDFEKLTNYSVTDLNVORKAIHELIQVMAELSPAAKTGKRKRSQ

[chemical structure]

SQIVSFYFKLFKNFKDDQSIQKSVETIKEDMNVKFFNSNKKKRDDFEKLTNYSVTDLNVORKAIHELIQVMAELSP

[chemical structure]

SHEDPEVKFNWYVDGVEVHNAKTKPREEQYNSTYRVVSVLTVLHQDWLNGKEYKCKVSNKALPAPIEKT

[chemical structure]

[chemical structure]

(human PD-L1 extracellular domain mutant2 154Q/E58M/R113T/M115L/S117A/G119K
extracellular domain-linker-single-chain mutant homodimer IFN-γ (A23V/A23V)-linker-hinge-IgG1 Fc
mutant2; PD-L1 is underlined; linker is shaded; hinge is bolded; IFN-γ is italicized
SEQ ID NO: 319

[chemical structure]

[chemical structure]

EGYPKAEVIWTSSDHQVLSGKTTTTNSKREEKLFNVTSTLRINTTTNEIFYCTFRRLDPEENHTAELVIPELPL

[chemical structure]

DDQSIQKSVETIKEDMNVKFFNSNKKKRDDFEKLTNYSVTDLNVQRKAIHELIQVMAELSPAAKTGKRKRSQMLF

[chemical structure]

SFYFKLFKNFKDDQSIQKSVETIKEDMNVKFFNSNKKKRDDFEKLTNYSVTDLNVQRKAIHELIQVMAELSPAAKT

[chemical structure]

DPEVKFNWYVDGVEVHNAKTKPREEQYNSTYRVVSVLTVLHQDWLNGKEYKCKVSNKALPAPIEKTISK

[chemical structure]

KLTVDKSRWQQGNVFSCSVMHEALHNHYTQKSLSLSPGK
(human PD-L1 extracellular domain mutant7 I54Q/E58M/R113T/M115L/S117A/G119K
extracellular domain-linker- single-chain mutant homodimer IFN-γ (A23V/A23V)-linker -hinge-IgG1 Fc
mutant2; PD-L1 is underlined; linker is bolded and underlined; hinge is bolded; IFN-γ is italicized
SEQ ID NO: 320

[chemical structure]

[chemical structure]

EGYPKAEVIWTSSDHQVLSGKTTTTNSKREEKLFNVTSTLRINTTTNEIFYCTFRRLDPEENHTAELVIPELPL

[chemical structure]

DDQSIQKSVETIKEDMNVKFFNSNKKKRDDFEKLTNYSVTDLNVQRKAIHELIQVMAELSPAAKTGKRKRSQMLF

[chemical structure]

SFYFKLFKNFKDDQSIQKSVETIKEDMNVKFFNSNKKKRDDFEKLTNYSVTDLNVORKAIHELIQVMAELSPAAKT

[chemical structure]

DPEVKFNWYVDGVEVHNAKTKPREEQYNSTYRVVSVLTVLHQDWLNGKEYKCKVSNKALPAPIEKTISK

[chemical structure]

KLTVDKSRWQQGNVFSCSVMHEALHNHYTQKSLSLSPGK
(human PD-L2 extracellular domain mutant2 S58V extracellular domain-linker-single-
chain mutant homodimer IFN-γ (A23V/A23V)-linker-hinge-IgG1 Fc mutant1; PD-L2 is underlined; linker is
bolded and underlined; hinge is bolded; IFN-γ is italicized)
SEQ ID NO: 321

[chemical structure]

QVRDEGQYQCIIIYGVAWDYKYLTLKVKASYRKINTHILKVPETDEVELTCQATGYPLAEVSWPNVSVPAN
TSHSRTPEGLYQVTSVLRLKPPPGRNFSCVFWNTHVRELTLASIDLQSQMEPRTHPTGGGGSGGGQDPYVK

[chemical structure]

FNSNKKKRDDFEKLTNYSVTDLNVQRKAIHELIQVMAELSPAAKTGKRKRSQMLFRGGGGSGGGGSGGGGSG

[chemical structure]

ETIKEDMNVKFFNSNKKKRDDFEKLTNYSVTDLNVORKAIHELIQVMAELSPAAKTGKRKRSQMLFRGGGGGSG

[chemical structure]

[chemical structure]

[chemical structure]

VMHEALHNHYTQKSLSLSPGK
(human PD-L2 extracellular domain mutant4 T56V/S58V/Q60L extracellular domain-
linker- single-chain mutant homodimer IFN-y (A23V/A23V)-linker -hinge-IgG1 Fc mutant1; PD-L2 is
underlined; linker is bolded and underlined; hinge is bolded; IFN-y is italicized)
SEQ ID NO: 322

[chemical structure]

VQVRDEGQYQCIIIYGVAWDYKYLTLKVKASYRKINTHILKVPETDEVELTCQATGYPLAEVSWPNVSVPA
NTSHSRTPEGLYQVTSVLRLKPPPGRNFSCVFWNTHVRELTLASIDLQSQMEPRTHPTGGGGSGGGQDPYV

[chemical structure]

FFNSNKKKRDDFEKLTNYSVTDLNVORKAIHELIQVMAELSPAAKTGKRKRSOMLFRGGGGSGGGGSGGGGS

[chemical structure]

[chemical structure]

[chemical structure]

[chemical structure]

VMHEALHNHYTQKSLSLSPGK
(human PD-L2 extracellular domain mutant2 S58V extracellular domain-linker-single-
chain mutant homodimer IFN-y (A23V/A23V)-linker-hinge-IgG1 Fc mutant2; PD-L2 is underlined; linker is
bolded and underlined; hinge is bolded; IFN-y is italicized
SEQ ID NO: 323

[chemical structure]

QVRDEGQYQCIIIYGVAWDYKYLTLKVKASYRKINTHILKVPETDEVELTCQATGYPLAEVSWPNVSVPAN
TSHSRTPEGLYQVTSVLRLKPPPGRNFSCVFWNTHVRELTLASIDLOSQMEPRTHPTGGGSGQDPYVKEAEN

[chemical structure]

KKKRDDFEKLTNYSVTDLNVQRKAIHELIQVMAELSPAAKTGKRKRSQMLFRGGGGSGGGGSGGGGSGGGG

[chemical structure]

EDMNVKFFNSNKKKRDDFEKLTNYSVTDLNVQRKAIHELIQVMAELSPAAKTGKRKRSQMLFRGGGGGSGGG

[chemical structure]

[chemical structure]

[chemical structure]

HEALHNHYTQKSLSLSPGK
(human PD-L2 extracellular domain mutant4 T56V/S58V/Q60L extracellular domain-
linker-single-chain mutant homodimer IFN-γ (A23V/A23V)-linker-hinge-IgG1 Fc mutant2; PD-L2 is
underlined; linker is bolded and underlined; hinge is bolded; IFN-γ is italicized
SEQ ID NO: 324

[chemical structure]

VQVRDEGQYQCIIIYGVAWDYKYLTLKVKASYRKINTHILKVPETDEVELTCQATGYPLAEVSWPNVSVPA
NTSHSRTPEGLYQVTSVLRLKPPPGRNFSCVFWNTHVRELTLASIDLQSQMEPRTHPTGGGSGQDPYVKEA

[chemical structure]

SNKKKRDDFEKLTNYSVTDLNVQRKAIHELIQVMAELSPAAKTGKRKRSQMLFRGGGGSGGGGSGGGGSGGG

[chemical structure]

KEDMNVKFFNSNKKKRDDFEKLTNYSVTDLNVQRKAIHELIQVMAELSPAAKTGKRKRSQMLFRGGGGGSGG

[chemical structure]

[chemical structure]

[chemical structure]

MHEALHNHYTQKSLSLSPGK
(human CD155 extracellular domain-linker-single-chain mutant homodimer IFN-γ
(A23V/A23V)-linker hinge-IgG1 Fc mutant1; CD155 is underlined; linker is bolded and underlined; hinge is
bolded; IFN-γ is italicized)
SEQ ID NO: 325
WPPPGTGDVVVQAPTQVPGFLGDSVTLPCYLQVPNMEVTHVSQLTWARHGESGSMAVFHQTQGPSYSES
KRLEFVAARLGAELRNASLRMFGLRVEDEGNYTCLFVTFPQGSRSVDIWLRVLAKPQNTAEVQKVOLTGE
PVPMARCVSTGGRPPAQITWHSDLGGMPNTSQVPGFLSGTVTVTSLWILVPSSQVDGKNVTCKVEHESFEK
PQLLTVNLTVYYPPEVSISGYDNNWYLGQNEATLTCDARSNPEPTGYNWSTTMGPLPPFAVAQGAQLLIRP
VDKPINTTLICNVTNALGARQAELTVQVKEGPPSEHSGISRNGGGGSGGGQDPYVKEAENLKKYFNAGHSD

[chemical structure]

NYSVTDLNVQRKAIHELIQVMAELSPAAKTGKRKRSQMLFRGGGGSGGGGSGGGGSGGGGSQDPYVKEAENL

[chemical structure]

KKRDDFEKLTNYSVTDLNVQRKAIHELIQVMAELSPAAKTGKRKRSQMLFRGGGGGSGGGDKTHTCPPCPAP

[chemical structure]

[chemical structure]

[chemical structure]

SLSPGK
(human CD155 extracellular domain-linker-single-chain mutant homodimer IFN-γ
(A23V/A23V)-linker-hinge-IgG1 Fc mutant2; CD155 is underlined; linker is bolded and underlined; hinge is
bolded; IFN-γ is italicized
SEQ ID NO: 326
WPPPGTGDVVVQAPTQVPGFLGDSVTLPCYLQVPNMEVTHVSQLTWARHGESGSMAVFHQTQGPSYSES
KRLEFVAARLGAELRNASLRMFGLRVEDEGNYTCLFVTFPQGSRSVDIWLRVLAKPQNTAEVQKVQLTGE
PVPMARCVSTGGRPPAQITWHSDLGGMPNTSQVPGFLSGTVTVTSLWILVPSSQVDGKNVTCKVEHESFEK
PQLLTVNLTVYYPPEVSISGYDNNWYLGQNEATLTCDARSNPEPTGYNWSTTMGPLPPFAVAQGAQLLIRP

[chemical structure]

GTLFLGILKNWKEESDRKIMOSQIVSFYFKLFKNFKDDQSIOKSVETIKEDMNVKFFNSNKKKRDDFEKLTNYSVT
DLNVQRKAIHELIQVMAELSPAAKTGKRKRSQMLFRGGGGSGGGGSGGGGSGGGGSQDPYVKEAENLKKYF

[chemical structure]

[chemical structure]

GGPSVFLFPPKPKDTLMISRTPEVTCVVVDVSHEDPEVKFNWYVDGVEVHNAKTKPREEQYNSTYRVVSV

[chemical structure]

[chemical structure]

PGK
(human PD-L1 mutant2 154Q/E58M/R113T/M115L/S117A/G119K extracellular domain-
linker-IL-2 mutant R38D/K43E/E61R) linker-hinge-IgG1 Fc mutant2; PD-L1 is underlined; linker is bolded
and underlined; hinge is bolded; IL-12 subunits are italicized
SEQ ID NO: 327

[chemical structure]

[chemical structure]

EGYPKAEVIWTSSDHQVLSGKTTTTNSKREEKLFNVTSTLRINTTTNEIFYCTFRRLDPEENHTAELVIPELPL

[chemical structure]

LKPLEEVLNLAOSKNFHLRPRDLISNINVIVLELKGSETTFMCEYADETATIVEFLNRWITFCOSIISTLT

[chemical structure]

GVEVHNAKTKPREEQYNSTYRVVSVLTVLHQDWLNGKEYKCKVSNKALPAPIEKTISKAKGQPREPQVY

[chemical structure]

QGNVFSCSVMHEALHNHYTQKSLSLSPGK
(human PD-L1 extracellular domain mutant2 154Q/E58M/R113T/M115L/S117A/G119K
extracellular domain-linker-single-chain IL-12 mutant heterodimer IL-12B (p40 E59A/F60A)-linker IL-12A
(wt p35)-hinge-IgG1 Fc mutant1; PD-L1 is underlined; linker is bolded and underlined; hinge is bolded;
mouse IL-12 subunits are italicized)
SEQ ID NO: 328

[chemical structure]

[chemical structure]

EGYPKAEVIWTSSDHQVLSGKTTTTNSKREEKLFNVTSTLRINTTTNEIFYCTFRRLDPEENHTAELVIPELPL
AHPPNERGGGGSGGGMWELEKDVYVVEVDWTPDAPGETVNLTCDTPEEDDITWTSDORHGVIGSGKTLTITV

[chemical structure]

KSSSSSPDSRAVTCGMASLSAEKVTLDORDYEKYSVSCOEDVTCPTAEETLPIELALEAROONKYENYSTSFFIRDII
KPDPPKNLOMKPLKNSOVEVSWEYPDSWSTPHSYFSLKFFVRIORKKEKMKETEEGCNQKGAFLVEKTSTEVQC
KGGNVCVQAQDRYYNSSCSKWACVPCRVRSGGPGGGGSGGGSGGGGSGRVIPVSGPARCLSOSRNLLKTTDD
MVKTAREKLKHYSCTAEDIDHEDITRDOTSTLKTCLPLELHKNESCLATRETSSTTRGSCLPPQKTSLMMTLCLGSI
YEDLKMYQTEFQAINAALQNHNHQQIILDKGMLVAIDELMOSLNHNGETLROKPPVGEADPYRVKMKLCILLHA

[chemical structure]

VSHEDPEVKFNWYVDGVEVHNAKTKPREEQYNSTYRVVSVLTVLHQDWLNGKEYKCKVSNKALPAPIEK

[chemical structure]

[chemical structure]

(human PD-L1 extracellular domain mutant2 I54Q/E58M/R113T/M115L/S117A/G119K
extracellular domain-linker-hinge-IgG1 Fc mutant1- linker-single-chain IL-12 mutant heterodimer IL-12B
(p40 E59A/F60A)-linker IL-12A (wt p35); PD-L1 is underlined; linker is bolded and underlined; hinge is
bolded; mouse IL-12 subunits are italicized)
SEQ ID NO: 329

[chemical structure]

[chemical structure]

EGYPKAEVIWTSSDHQVLSGKTTTTNSKREEKLFNVTSTLRINTTTNEIFYCTFRRLDPEENHTAELVIPELPL

[chemical structure]

NWYVDGVEVHNAKTKPREEQYNSTYRVVSVLTVLHQDWLNGKEYKCKVSNKALPAPIEKTISKAKGQPR

[chemical structure]

SRWQQGNVFSCSVMHEALHNHYTQKSLSLSPGKGGGGSGGGMWELEKDVYVVEVDWTPDAPGETVNLTC

[chemical structure]

KCEAPNYSGRFTCSWLVQRNMDLKFNIKSSSSSPDSRAVTCGMASLSAEKVTLDQRDYEKYSVSCQEDVTCPTAEE
TLPIELALEARQQNKYENYSTSFFIRDIIKPDPPKNLQMKPLKNSQVEVSWEYPDSWSTPHSYFSLKFFVRIQRKKE
KMKETEEGCNQKGAFLVEKTSTEVQCKGGNVCVQAQDRYYNSSCSKWACVPCRVRSGGPGGGGSGGGSGGG
GSGRVIPVSGPARCLSQSRNLLKTTDDMVKTAREKLKHYSCTAEDIDHEDITRDOTSTLKTCLPLELHKNESCLAT
RETSSTTRGSCLPPQKTSLMMTLCLGSIYEDLKMYQTEFQAINAALQNHNHQQIILDKGMLVAIDELMQSLNHNG
ETLROKPPVGEADPYRVKMKLCILLHAFSTRVVTINRVMGYLSSA
(mouse IL-12 E59A/F60A; linker is bolded and underlined; mouse IL-12 subunits are
italicized)
SEQ ID NO: 330

[chemical structure]

TLSHSHLLLHKKENGIWSTEILKNFKNKTFLKCEAPNYSGRFTCSWLVORNMDLKFNIKSSSSSPDSRAVTCGMAS
LSAEKVTLDORDYEKYSVSCQEDVTCPTAEETLPIELALEARQONKYENYSTSFFIRDIIKPDPPKNLQMKPLKNSQ
VEVSWEYPDSWSTPHSYFSLKFFVRIQRKKEKMKETEEGCNQKGAFLVEKTSTEVQCKGGNVCVQAQDRYYNSS
CSKWACVPCRVRSGGPGGGGSGGGSGGGGSGRVIPVSGPARCLSQSRNLLKTTDDMVKTAREKLKHYSCTAE
DIDHEDITRDQTSTLKTCLPLELHKNESCLATRETSSTTRGSCLPPQKTSLMMTLCLGSIYEDLKMYQTEFQAINAA
LQNHNHQQIILDKGMLVAIDELMOSLNHNGETLRQKPPVGEADPYRVKMKLCILLHAFSTRVVTINRVMGYLSSA
(single-chain IL-12 mutant heterodimer IL-12B (p40 E59A)-linker-IL-12A (wt p35); linker
is bolded and underlined; IL-12 subunits are italicized)
SEQ ID NO: 331

[chemical structure]

VLSHSLLLLHKKEDGIWSTDILKDOKEPKNKTFLRCEAKNYSGRFTCWWLTTISTDLTFSVKSSRGSSDPQGVTCG
AATLSAERVRGDNKEYEYSVECQEDSACPAAEESLPIEVMVDAVHKLKYENYTSSFFIRDIIKPDPPKNLQLKPLKN
SRQVEVSWEYPDTWSTPHSYFSLTFCVQVQGKSKREKKDRVFTDKTSATVICRKNASISVRAQDRYYSSSWSEWAS
VPCSGGGGSGGGGSGGGGSGGGGSGRNLPVATPDPGMFPCLHHSQNLLRAVSNMLQKARQTLEFYPCTSEE
IDHEDITKDKTSTVEACLPLELTKNESCLNSRETSFITNGSCLASRKTSFMMALCLSSIYEDLKMYQVEFKTMNAKL
LMDPKRQIFLDQNMLAVIDELMQALNFNSETVPQKSSLEEPDFYKTKIKLCILLHAFRIRAVTIDRVMSYLNAS
(single-chain IL-12 mutant heterodimer IL-12B (p40 G64A)-linker-IL-12A (wt p35); linker
is bolded and underlined; IL-12 subunits are italicized)
SEQ ID NO: 332

[chemical structure]

LSHSLLLLHKKEDGIWSTDILKDOKEPKNKTFLRCEAKNYSGRFTCWWLTTISTDLTFSVKSSRGSSDPQGVTCGA
ATLSAERVRGDNKEYEYSVECOEDSACPAAEESLPIEVMVDAVHKLKYENYTSSFFIRDIIKPDPPKNLOLKPLKNS
RQVEVSWEYPDTWSTPHSYFSLTFCVQVQGKSKREKKDRVFTDKTSATVICRKNASISVRAQDRYYSSSWSEWASV
PCSGGGGSGGGGSGGGGSGGGGSGRNLPVATPDPGMFPCLHHSQNLLRAVSNMLQKARQTLEFYPCTSEEI
DHEDITKDKTSTVEACLPLELTKNESCLNSRETSFITNGSCLASRKTSFMMALCLSSIYEDLKMYQVEFKTMNAKLL
MDPKRQIFLDQNMLAVIDELMQALNFNSETVPQKSSLEEPDFYKTKIKLCILLHAFRIRAVTIDRVMSYLNAS
SEQ ID NO: 333
GGGGSGGGSGGGG
SEQ ID NO: 334
GGGGSGGG
SEQ ID NO: 335
GGPGGGGSGGGSGGGG

The application's sequence listing, which the Patent Office published only in electronic form, follows.

SEQUENCE LISTING (335 sequences)

SEQ ID NO: 1 - protein, 133 aa, Homo sapiens [sequence omitted]

SEQ ID NO: 2 - protein, 133 aa, Artificial Sequence
  Synthetic Construct
APTSSSTKKTQLQLEHLLLDLQMILNGINNYKNPKLTDMLTFEFYMPKKATELKHLQCLERELKPLEEVLNLAQSKNFHLRPRDLISNINVIVLELKGSETTFMCEYADETATIVEFLNRWITFCQSIISTLT

SEQ ID NO: 3 - protein, 165 aa, Homo sapiens
CDLPQTHSLGSRRTLMLLAQMRKISLFSCLKDRHDFGFPQEEFGNQFQKAETIPVLHEMIQQIFNLFSTKDSSAAWDETLLDKFYTELYQQLNDLEACVIQGVGVTETPLMKEDSILAVRKYFQRITLYLKEKKYSPCAWEVVRAEIMRSFSLSTNLQESLRSKE

SEQ ID NO: 4 - protein, 165 aa, Artificial Sequence
  Synthetic Construct
CDLPQTHSLGSRRTLMLLAQMRKISLFSCAKDRHDFGFPQEEFGNQFQKAETIPVLHEMIQQIFNLFSTKDSSAAWDETLLDKFYTELYQQLNDLEACVIQGVGVTETPLMKEDSILAVRKYFQRITLYLKEKKYSPCAWEVVRAEIMRSFSLSTNLQESLRSKE

SEQ ID NO: 5 - protein, 165 aa, Artificial Sequence
  Synthetic Construct
CDLPQTHSLGSRRTLMLLAQMRKISLFSCLADRHDFGFPQEEFGNQFQKAETIPVLHEMIQQIFNLFSTKDSSAAWDETLLDKFYTELYQQLNDLEACVIQGVGVTETPLMKEDSILAVRKYFQRITLYLKEKKYSPCAWEVVRAEIMRSFSLSTNLQESLRSKE

SEQ ID NO: 6 - protein, 165 aa, Artificial Sequence
  Synthetic Construct
CDLPQTHSLGSRRTLMLLAQMRKISLFSCLKARHDFGFPQEEFGNQFQKAETIPVLHEMIQQIFNLFSTKDSSAAWDETLLDKFYTELYQQLNDLEACVIQGVGVTETPLMKEDSILAVRKYFQRITLYLKEKKYSPCAWEVVRAEIMRSFSLSTNLQESLRSKE

SEQ ID NO: 7 - protein, 165 aa, Artificial Sequence
  Synthetic Construct
CDLPQTHSLGSRRTLMLLAQMRKISLFSCLKDAHDFGFPQEEFGNQFQKAETIPVLHEMIQQIFNLFSTKDSSAAWDETLLDKFYTELYQQLNDLEACVIQGVGVTETPLMKEDSILAVRKYFQRITLYLKEKKYSPCAWEVVRAEIMRSFSLSTNLQESLRSKE

SEQ ID NO: 8 - protein, 165 aa, Artificial Sequence
  Synthetic Construct
CDLPQTHSLGSRRTLMLLAQMRKISLFSCLKDRADFGFPQEEFGNQFQKAETIPVLHEMIQQIFNLFSTKDSSAAWDETLLDKFYTELYQQLNDLEACVIQGVGVTETPLMKEDSILAVRKYFQRITLYLKEKKYSPCAWEVVRAEIMRSFSLSTNLQESLRSKE

SEQ ID NO: 9 - protein, 165 aa, Artificial Sequence
  Synthetic Construct
CDLPQTHSLGSRRTLMLLAQMRKISLFSCLKDRHAFGFPQEEFGNQFQKAETIPVLHEMIQQIFNLFSTKDSSAAWDETLLDKFYTELYQQLNDLEACVIQGVGVTETPLMKEDSILAVRKYFQRITLYLKEKKYSPCAWEVVRAEIMRSFSLSTNLQESLRSKE

SEQ ID NO: 10 - protein, 138 aa, Homo sapiens
QDPYVKEAENLKKYFNAGHSDVADNGTLFLGILKNWKEESDRKIMQSQIVSFYFKLFKNFKDDQSIQKSVETIKEDMNVKFFNSNKKKRDDFEKLTNYSVTDLNVQRKAIHELIQVMAELSPAAKTGKRKRSQMLFRG

SEQ ID NO: 11 - protein, 138 aa, Artificial Sequence
  Synthetic Construct
QDPYVKEAENLKKYFNAGHAAVADNGTLFLGILKNWKEESDRKIMQSQIVSFYFKLFKNFKDDQSIQKSVETIKEDMNVKFFNSNKKKRDDFEKLTNYSVTDLNVQRKAIHELIQVMAELSPAAKTGKRKRSQMLFRG

SEQ ID NO: 12 - protein, 138 aa, Artificial Sequence
  Synthetic Construct
QDPYVKEAENLKKYFNAGHSDASDNGTLFLGILKNWKEESDRKIMQSQIVSFYFKLFKNFKDDQSIQKSVETIKEDMNVKFFNSNKKKRDDFEKLTNYSVTDLNVQRKAIHELIQVMAELSPAAKTGKRKRSQMLFRG

SEQ ID NO: 13 - protein, 138 aa, Artificial Sequence
  Synthetic Construct
QDPYVKEAENLKKYFNAGHSDVVDNGTLFLGILKNWKEESDRKIMQSQIVSFYFKLFKNFKDDQSIQKSVETIKEDMNVKFFNSNKKKRDDFEKLTNYSVTDLNVQRKAIHELIQVMAELSPAAKTGKRKRSQMLFRG

SEQ ID NO: 14 - protein, 138 aa, Artificial Sequence
  Synthetic Construct
QDPYVKEAENLKKYFNAGHSDVAAAGTLFLGILKNWKEESDRKIMQSQIVSFYFKLFKNFKDDQSIQKSVETIKEDMNVKFFNSNKKKRDDFEKLTNYSVTDLNVQRKAIHELIQVMAELSPAAKTGKRKRSQMLFRG

SEQ ID NO: 15 - protein, 138 aa, Artificial Sequence
  Synthetic Construct
QDPYVKEAENLKKYFNAGHSDVEEKGTLFLGILKNWKEESDRKIMQSQIVSFYFKLFKNFKDDQSIQKSVETIKEDMNVKFFNSNKKKRDDFEKLTNYSVTDLNVQRKAIHELIQVMAELSPAAKTGKRKRSQMLFRG

SEQ ID NO: 16 - protein, 138 aa, Artificial Sequence
  Synthetic Construct
QDPYVKEAENLKKYFNAGHSDVQDNGTLFLGILKNWKEESDRKIMQSQIVSFYFKLFKNFKDDQSIQKSVETIKEDMNVKFFNSNKKKRDDFEKLTNYSVTDLNVQRKAIHELIQVMAELSPAAKTGKRKRSQMLFRG

SEQ ID NO: 17 - protein, 138 aa, Artificial Sequence
  Synthetic Construct
QDPYVKEAENLKKYFNAGHSKVADNGTLFLGILKNWKEESDRKIMQSQIVSFYFKLFKNFKDDQSIQKSVETIKEDMNVKFFNSNKKKRDDFEKLTNYSVTDLNVQRKAIHELIQVMAELSPAAKTGKRKRSQMLFRG

SEQ ID NO: 18 - protein, 297 aa, Artificial Sequence
  Synthetic Construct
QDPYVKEAENLKKYFNAGHSDVADNGTLFLGILKNWKEESDRKIMQSQIVSFYFKLFKNFKDDQSIQKSVETIKEDMNVKFFNSNKKKRDDFEKLTNYSVTDLNVQRKAIHELIQVMAELSPAAKTGKRKRSQMLFRGFEGGGSGGGGSGGGGSGGGGSQDPYVKEAENLKKYFNAGHSDVADNGTLFLGILKNWKEESDRKIMQSQIVSFYFKLFKNFKDDQSIQKSVETIKEDMNVKFFNSNKKKRDDFEKLTNYSVTDLNVQRKAIHELIQVMAELSPAAKTGKRKRSQMLFRG

SEQ ID NO: 19 - protein, 297 aa, Artificial Sequence
  Synthetic Construct
QDPYVKEAENLKKYFNAGHSDVVDNGTLFLGILKNWKEESDRKIMQSQIVSFYFKLFKNFKDDQSIQKSVETIKEDMNVKFFNSNKKKRDDFEKLTNYSVTDLNVQRKAIHELIQVMAELSPAAKTGKRKRSQMLFRGFEGGGSGGGGSGGGGSGGGGSQDPYVKEAENLKKYFNAGHSDVVDNGTLFLGILKNWKEESDRKIMQSQIVSFYFKLFKNFKDDQSIQKSVETIKEDMNVKFFNSNKKKRDDFEKLTNYSVTDLNVQRKAIHELIQVMAELSPAAKTGKRKRSQMLFRG

SEQ ID NO: 20 - protein, 160 aa, Homo sapiens
SPGQGTQSENSCTHFPGNLPNMLRDLRDAFSRVKTFFQMKDQLDNLLLKESLLEDFKGYLGCQALSEMIQFYLEEVMPQAENQDPDIKAHVNSLGENLKTLRLRLRRCHRFLPCENKSKAVEQVKNAFNKLQEKGIYKAMSEFDIFINYIEAYMTMKIRN

SEQ ID NO: 21 - protein, 160 aa, Artificial Sequence
  Synthetic Construct
SPGQGTQSENSCTHFPGNLPNMLADLRDAFSRVKTFFQMKDQLDNLLLKESLLEDFKGYLGCQALSEMIQFYLEEVMPQAENQDPDIKAHVNSLGENLKTLRLRLRRCHRFLPCENKSKAVEQVKNAFNKLQEKGIYKAMSEFDIFINYIEAYMTMKIRN

SEQ ID NO: 22 - protein, 160 aa, Artificial Sequence
  Synthetic Construct
SPGQGTQSENSCTHFPGNLPNMLRAARDAFSRVKTFFQMKDQLDNLLLKESLLEDFKGYLGCQALSEMIQFYLEEVMPQAENQDPDIKAHVNSLGENLKTLRLRLRRCHRFLPCENKSKAVEQVKNAFNKLQEKGIYKAMSEFDIFINYIEAYMTMKIRN

SEQ ID NO: 23 - protein, 160 aa, Artificial Sequence
  Synthetic Construct
SPGQGTQSENSCTHFPGNLPNMLRDLADAFSRVKTFFQMKDQLDNLLLKESLLEDFKGYLGCQALSEMIQFYLEEVMPQAENQDPDIKAHVNSLGENLKTLRLRLRRCHRFLPCENKSKAVEQVKNAFNKLQEKGIYKAMSEFDIFINYIEAYMTMKIRN

SEQ ID NO: 24 - protein, 160 aa, Artificial Sequence
  Synthetic Construct
SPGQGTQSENSCTHFPGNLPNMLRDLRASFSRVKTFFQMKDQLDNLLLKESLLEDFKGYLGCQALSEMIQFYLEEVMPQAENQDPDIKAHVNSLGENLKTLRLRLRRCHRFLPCENKSKAVEQVKNAFNKLQEKGIYKAMSEFDIFINYIEAYMTMKIRN

SEQ ID NO: 25 - protein, 160 aa, Artificial Sequence
  Synthetic Construct
SPGQGTQSENSCTHFPGNLPNMLRDLRDAAARVKTFFQMKDQLDNLLLKESLLEDFKGYLGCQALSEMIQFYLEEVMPQAENQDPDIKAHVNSLGENLKTLRLRLRRCHRFLPCENKSKAVEQVKNAFNKLQEKGIYKAMSEFDIFINYIEAYMTMKIRN

SEQ ID NO: 26 - protein, 160 aa, Artificial Sequence
  Synthetic Construct
SPGQGTQSENSCTHFPGNLPNMLRDLRDAFSAVKTFFQMKDQLDNLLLKESLLEDFKGYLGCQALSEMIQFYLEEVMPQAENQDPDIKAHVNSLGENLKTLRLRLRRCHRFLPCENKSKAVEQVKNAFNKLQEKGIYKAMSEFDIFINYIEAYMTMKIRN

SEQ ID NO: 27 - protein, 341 aa, Artificial Sequence
  Synthetic Construct
SPGQGTQSENSCTHFPGNLPNMLRDLRDAFSRVKTFFQMKDQLDNLLLKESLLEDFKGYLGCQALSEMIQFYLEEVMPQAENQDPDIKAHVNSLGENLKTLRLRLRRCHRFLPCENKSKAVEQVKNAFNKLQEKGIYKAMSEFDIFINYIEAYMTMKIRNFEGGGSGGGGSGGGGSGGGGSSPGQGTQSENSCTHFPGNLPNMLRDLRDAFSRVKTFFQMKDQLDNLLLKESLLEDFKGYLGCQALSEMIQFYLEEVMPQAENQDPDIKAHVNSLGENLKTLRLRLRRCHRFLPCENKSKAVEQVKNAFNKLQEKGIYKAMSEFDIFINYIEAYMTMKIRN

SEQ ID NO: 28 - protein, 341 aa, Artificial Sequence
  Synthetic Construct
SPGQGTQSENSCTHFPGNLPNMLRDLADAFSRVKTFFQMKDQLDNLLLKESLLEDFKGYLGCQALSEMIQFYLEEVMPQAENQDPDIKAHVNSLGENLKTLRLRLRRCHRFLPCENKSKAVEQVKNAFNKLQEKGIYKAMSEFDIFINYIEAYMTMKIRNFEGGGSGGGGSGGGGSGGGGSSPGQGTQSENSCTHFPGNLPNMLRDLADAFSRVKTFFQMKDQLDNLLLKESLLEDFKGYLGCQALSEMIQFYLEEVMPQAENQDPDIKAHVNSLGENLKTLRLRLRRCHRFLPCENKSKAVEQVKNAFNKLQEKGIYKAMSEFDIFINYIEAYMTMKIRN

SEQ ID NO: 29 - protein, 197 aa, Homo sapiens
RNLPVATPDPGMFPCLHHSQNLLRAVSNMLQKARQTLEFYPCTSEEIDHEDITKDKTSTVEACLPLELTKNESCLNSRETSFITNGSCLASRKTSFMMALCLSSIYEDLKMYQVEFKTMNAKLLMDPKRQIFLDQNMLAVIDELMQALNFNSETVPQKSSLEEPDFYKTKIKLCILLHAFRIRAVTIDRVMSYLNAS

SEQ ID NO: 30 - protein, 306 aa, Homo sapiens
IWELKKDVYVVELDWYPDAPGEMVVLTCDTPEEDGITWTLDQSSEVLGSGKTLTIQVKEFGDAGQYTCHKGGEVLSHSLLLLHKKEDGIWSTDILKDQKEPKNKTFLRCEAKNYSGRFTCWWLTTISTDLTFSVKSSRGSSDPQGVTCGAATLSAERVRGDNKEYEYSVECQEDSACPAAEESLPIEVMVDAVHKLKYENYTSSFFIRDIIKPDPPKNLQLKPLKNSRQVEVSWEYPDTWSTPHSYFSLTFCVQVQGKSKREKKDRVFTDKTSATVICRKNASISVRAQDRYYSSSWSEWASVPCS

SEQ ID NO: 31 - protein, 306 aa, Artificial Sequence
  Synthetic Construct
IWELKKDVYVVELDWYPDAPGEMVVLTCDTPEEDGITWTLDQSSEVLGSGKTLTIQVKAAGDAGQYTCHKGGEVLSHSLLLLHKKEDGIWSTDILKDQKEPKNKTFLRCEAKNYSGRFTCWWLTTISTDLTFSVKSSRGSSDPQGVTCGAATLSAERVRGDNKEYEYSVECQEDSACPAAEESLPIEVMVDAVHKLKYENYTSSFFIRDIIKPDPPKNLQLKPLKNSRQVEVSWEYPDTWSTPHSYFSLTFCVQVQGKSKREKKDRVFTDKTSATVICRKNASISVRAQDRYYSSSWSEWASVPCS

SEQ ID NO: 32 - protein, 306 aa, Artificial Sequence
  Synthetic Construct
IWELKKDVYVVELDWYPDAPGEMVVLTCDTPEEDGITWTLDQSSEVLGSGKTLTIQVKAFGDAGQYTCHKGGEVLSHSLLLLHKKEDGIWSTDILKDQKEPKNKTFLRCEAKNYSGRFTCWWLTTISTDLTFSVKSSRGSSDPQGVTCGAATLSAERVRGDNKEYEYSVECQEDSACPAAEESLPIEVMVDAVHKLKYENYTSSFFIRDIIKPDPPKNLQLKPLKNSRQVEVSWEYPDTWSTPHSYFSLTFCVQVQGKSKREKKDRVFTDKTSATVICRKNASISVRAQDRYYSSSWSEWASVPCS

SEQ ID NO: 33 - protein, 306 aa, Artificial Sequence
  Synthetic Construct
IWELKKDVYVVELDWYPDAPGEMVVLTCDTPEEDGITWTLDQSSEVLGSGKTLTIQVKEAGDAGQYTCHKGGEVLSHSLLLLHKKEDGIWSTDILKDQKEPKNKTFLRCEAKNYSGRFTCWWLTTISTDLTFSVKSSRGSSDPQGVTCGAATLSAERVRGDNKEYEYSVECQEDSACPAAEESLPIEVMVDAVHKLKYENYTSSFFIRDIIKPDPPKNLQLKPLKNSRQVEVSWEYPDTWSTPHSYFSLTFCVQVQGKSKREKKDRVFTDKTSATVICRKNASISVRAQDRYYSSSWSEWASVPCS

SEQ ID NO: 34 - protein, 306 aa, Artificial Sequence
  Synthetic Construct
IWELKKDVYVVELDWYPDAPGEMVVLTCDTPEEDGITWTLDQSSEVLGSGKTLTIQVKEFGDAAQYTCHKGGEVLSHSLLLLHKKEDGIWSTDILKDQKEPKNKTFLRCEAKNYSGRFTCWWLTTISTDLTFSVKSSRGSSDPQGVTCGAATLSAERVRGDNKEYEYSVECQEDSACPAAEESLPIEVMVDAVHKLKYENYTSSFFIRDIIKPDPPKNLQLKPLKNSRQVEVSWEYPDTWSTPHSYFSLTFCVQVQGKSKREKKDRVFTDKTSATVICRKNASISVRAQDRYYSSSWSEWASVPCS

SEQ ID NO: 35 - protein, 524 aa, Artificial Sequence
  Synthetic Construct
IWELKKDVYVVELDWYPDAPGEMVVLTCDTPEEDGITWTLDQSSEVLGSGKTLTIQVKEFGDAGQYTCHKGGEVLSHSLLLLHKKEDGIWSTDILKDQKEPKNKTFLRCEAKNYSGRFTCWWLTTISTDLTFSVKSSRGSSDPQGVTCGAATLSAERVRGDNKEYEYSVECQEDSACPAAEESLPIEVMVDAVHKLKYENYTSSFFIRDIIKPDPPKNLQLKPLKNSRQVEVSWEYPDTWSTPHSYFSLTFCVQVQGKSKREKKDRVFTDKTSATVICRKNASISVRAQDRYYSSSWSEWASVPCSGGGGSGGGGSGGGGSGGGGSGRNLPVATPDPGMFPCLHHSQNLLRAVSNMLQKARQTLEFYPCTSEEIDHEDITKDKTSTVEACLPLELTKNESCLNSRETSFITNGSCLASRKTSFMMALCLSSIYEDLKMYQVEFKTMNAKLLMDPKRQIFLDQNMLAVIDELMQALNFNSETVPQKSSLEEPDFYKTKIKLCILLHAFRIRAVTIDRVMSYLNAS

SEQ ID NO: 36 - protein, 524 aa, Artificial Sequence
  Synthetic Construct
IWELKKDVYVVELDWYPDAPGEMVVLTCDTPEEDGITWTLDQSSEVLGSGKTLTIQVKAAGDAGQYTCHKGGEVLSHSLLLLHKKEDGIWSTDILKDQKEPKNKTFLRCEAKNYSGRFTCWWLTTISTDLTFSVKSSRGSSDPQGVTCGAATLSAERVRGDNKEYEYSVECQEDSACPAAEESLPIEVMVDAVHKLKYENYTSSFFIRDIIKPDPPKNLQLKPLKNSRQVEVSWEYPDTWSTPHSYFSLTFCVQVQGKSKREKKDRVFTDKTSATVICRKNASISVRAQDRYYSSSWSEWASVPCSGGGGSGGGGSGGGGSGGGGSGRNLPVATPDPGMFPCLHHSQNLLRAVSNMLQKARQTLEFYPCTSEEIDHEDITKDKTSTVEACLPLELTKNESCLNSRETSFITNGSCLASRKTSFMMALCLSSIYEDLKMYQVEFKTMNAKLLMDPKRQIFLDQNMLAVIDELMQALNFNSETVPQKSSLEEPDFYKTKIKLCILLHAFRIRAVTIDRVMSYLNAS

SEQ ID NO: 37 - protein, 170 aa, Homo sapiens
RAVPGGSSPAWTQCQQLSQKLCTLAWSAHPLVGHMDLREEGDEETTNDVPHIQCGDGCDPQGLRDNSQFCLQRIHQGLIFYEKLLGSDIFTGEPSLLPDSPVGQLHASLLGLSQLLQPEGHHWETQQIPSLSPSQPWQRLLLRFKILRSLQAFVAVAARVFAHGAATLSP

SEQ ID NO: 38 - protein, 497 aa, Artificial Sequence
  Synthetic Construct
IWELKKDVYVVELDWYPDAPGEMVVLTCDTPEEDGITWTLDQSSEVLGSGKTLTIQVKEFGDAGQYTCHKGGEVLSHSLLLLHKKEDGIWSTDILKDQKEPKNKTFLRCEAKNYSGRFTCWWLTTISTDLTFSVKSSRGSSDPQGVTCGAATLSAERVRGDNKEYEYSVECQEDSACPAAEESLPIEVMVDAVHKLKYENYTSSFFIRDIIKPDPPKNLQLKPLKNSRQVEVSWEYPDTWSTPHSYFSLTFCVQVQGKSKREKKDRVFTDKTSATVICRKNASISVRAQDRYYSSSWSEWASVPCSGGGGSGGGGSGGGGSGGGGSGRAVPGGSSPAWTQCQQLSQKLCTLAWSAHPLVGHMDLREEGDEETTNDVPHIQCGDGCDPQGLRDNSQFCLQRIHQGLIFYEKLLGSDIFTGEPSLLPDSPVGQLHASLLGLSQLLQPEGHHWETQQIPSLSPSQPWQRLLLRFKILRSLQAFVAVAARVFAHGAATLSP

SEQ ID NO: 39 - protein, 497 aa, Artificial Sequence
  Synthetic Construct
IWELKKDVYVVELDWYPDAPGEMVVLTCDTPEEDGITWTLDQSSEVLGSGKTLTIQVKAAGDAGQYTCHKGGEVLSHSLLLLHKKEDGIWSTDILKDQKEPKNKTFLRCEAKNYSGRFTCWWLTTISTDLTFSVKSSRGSSDPQGVTCGAATLSAERVRGDNKEYEYSVECQEDSACPAAEESLPIEVMVDAVHKLKYENYTSSFFIRDIIKPDPPKNLQLKPLKNSRQVEVSWEYPDTWSTPHSYFSLTFCVQVQGKSKREKKDRVFTDKTSATVICRKNASISVRAQDRYYSSSWSEWASVPCSGGGGSGGGGSGGGGSGGGGSGRAVPGGSSPAWTQCQQLSQKLCTLAWSAHPLVGHMDLREEGDEETTNDVPHIQCGDGCDPQGLRDNSQFCLQRIHQGLIFYEKLLGSDIFTGEPSLLPDSPVGQLHASLLGLSQLLQPEGHHWETQQIPSLSPSQPWQRLLLRFKILRSLQAFVAVAARVFAHGAATLSP

SEQ ID NO: 40 - protein, 23 aa, Artificial Sequence
  Synthetic Construct
EPKSCDKTHTCPPCPAPELLGGP

SEQ ID NO: 41 - protein, 23 aa, Artificial Sequence
  Synthetic Construct
EPKSCDKTHTCPPCPAPEKKGGP

SEQ ID NO: 42 - protein, 23 aa, Artificial Sequence
  Synthetic Construct
EPKSCDKTHTCPPCPAPEDEGGP

SEQ ID NO: 43 - protein, 25 aa, Artificial Sequence
  Synthetic Construct
EPKSCDKDKTHTCPPCPAPELLGGP

SEQ ID NO: 44 - protein, 25 aa, Artificial Sequence
  Synthetic Construct
EPKSCDKDKTHTCPPCPAPEKKGGP

SEQ ID NO: 45 - protein, 25 aa, Artificial Sequence
  Synthetic Construct
EPKSCDKDKTHTCPPCPAPEDEGGP

SEQ ID NO: 46 - protein, 19 aa, Artificial Sequence
  Synthetic Construct
ERKCCVECPPCPAPPVAGP

SEQ ID NO: 47 - protein, 20 aa, Artificial Sequence
  Synthetic Construct
ESKYGPPCPSCPAPEFLGGP

SEQ ID NO: 48 - protein, 7 aa, Artificial Sequence
  Synthetic Construct
EPKSCDK

SEQ ID NO: 49 - protein, 5 aa, Artificial Sequence
  Synthetic Construct
EPKSC

SEQ ID NO: 50 - protein, 18 aa, Artificial Sequence
  Synthetic Construct
DKTHTCPPCPAPELLGGP

SEQ ID NO: 51 - protein, 18 aa, Artificial Sequence
  Synthetic Construct
DKTHTCPPCPAPEKKGGP

SEQ ID NO: 52 - protein, 18 aa, Artificial Sequence
  Synthetic Construct
DKTHTCPPCPAPEDEGGP

SEQ ID NO: 53 - protein, 5 aa, Artificial Sequence
  Synthetic Construct
DKTHT

SEQ ID NO: 54 - protein, 8 aa, Artificial Sequence
  Synthetic Construct
EPKSCDKP

SEQ ID NO: 55 - protein, 26 aa, Artificial Sequence
  Synthetic Construct
EPKSCDKPDKTHTCPPCPAPELLGGP

SEQ ID NO: 56 - protein, 26 aa, Artificial Sequence
  Synthetic Construct
EPKSCDKPDKTHTCPPCPAPEKKGGP

SEQ ID NO: 57 - protein, 26 aa, Artificial Sequence
  Synthetic Construct
EPKSCDKPDKTHTCPPCPAPEDEGGP

SEQ ID NO: 58 - protein, 20 aa, Artificial Sequence
  Synthetic Construct
ESKYGPPCPPCPAPEFLGGP

SEQ ID NO: 59 - protein, 24 aa, Artificial Sequence
  Synthetic Construct
EPPKSCDKTHTCPPCPAPELLGGP

SEQ ID NO: 60 - protein, 209 aa, Homo sapiens
SVFLFPPKPKDTLMISRTPEVTCVVVDVSHEDPEVKFNWYVDGVEVHNAKTKPREEQYNSTYRVVSVLTVLHQDWLNGKEYKCKVSNKALPAPIEKTISKAKGQPREPQVYTLPPSRDELTKNQVSLTCLVKGFYPSDIAVEWESNGQPENNYKTTPPVLDSDGSFFLYSKLTVDKSRWQQGNVFSCSVMHEALHNHYTQKSLSLSPGK

SEQ ID NO: 61 - protein, 209 aa, Artificial Sequence
  Synthetic Construct
SVFLFPPKPKDTLMISRTPEVTCVVVDVSHEDPEVKFNWYVDGVEVHNAKTKPREEQYNSTYRVVSVLTVLHQDWLNGKEYKCKVSNKALPAPIEKTISKAKGQPREPQVYVYPPSREEMTKNQVSLTCLVKGFYPSDIAVEWESNGQPENNYKTTPPVLDEDGSFALVSKLTVDKSRWQQGNVFSCSVMHEALHNHYTQKSLSLSPGK

SEQ ID NO: 62 - protein, 209 aa, Artificial Sequence
  Synthetic Construct
SVFLFPPKPKDTLMISRTPEVTCVVVDVSHEDPEVKFNWYVDGVEVHNAKTKPREEQYNSTYRVVSVLTVLHQDWLNGKEYKCKVSNKALPAPIEKTISKAKGQPREPQVYVLPPSREEMTKNQVSLLCLVKGFYPSDIAVEWESNGQPENRYMTWPPVLDSDGSFFLYSKLTVDKSRWQQGNVFSCSVMHEALHNHYTQKSLSLSPGK

SEQ ID NO: 63 - protein, 209 aa, Homo sapiens
SVFLFPPKPKDTLMISRTPEVTCVVVDVSQEDPEVQFNWYVDGVEVHNAKTKPREEQFNSTYRVVSVLTVLHQDWLNGKEYKCKVSNKGLPSSIEKTISKAKGQPREPQVYTLPPSQEEMTKNQVSLTCLVKGFYPSDIAVEWESNGQPENNYKTTPPVLDSDGSFFLYSRLTVDKSRWQEGNVFSCSVMHEALHNHYTQKSLSLSLGK

SEQ ID NO: 64 - protein, 209 aa, Artificial Sequence
  Synthetic Construct
SVFLFPPKPKDTLMISRTPEVTCVVVDVSHEDPEVKFNWYVDGVEVHNAKTKPREEQYASTYRVVSVLTVLHQDWLNGKEYKCKVSNKALPAPIEKTISKAKGQPREPQVYTLPPSRDELTKNQVSLTCLVKGFYPSDIAVEWESNGQPENNYKTTPPVLDSDGSFFLYSKLTVDKSRWQQGNVFSCSVMHEALHNHYTQKSLSLSPGK

SEQ ID NO: 65 - protein, 209 aa, Artificial Sequence
  Synthetic Construct
SVFLFPPKPKDTLMISRTPEVTCVVVDVSHEDPEVKFNWYVDGVEVHNAKTKPREEQYASTYRVVSVLTVLHQDWLNGKEYKCKVSNKALPAPIEKTISKAKGQPREPQVYTLPPSREEMTKNQVSLTCLVKGFYPSDIAVEWESNGQPENNYKTTPPVLDSDGSFFLYSKLTVDKSRWQQGNVFSCSVMHEALHNHYTQKSLSLSPGK

SEQ ID NO: 66 - protein, 209 aa, Artificial Sequence
  Synthetic Construct
SVFLFPPKPKDTLMISRTPEVTCVVVDVSHEDPEVKFNWYVDGVEVHNAKTKPREEQYNSTYRVVSVLTVLHQDWLNGKEYKCKVSNKALPAPIEKTISKAKGQPREPQVYTLPPSREEMTKNQVSLTCLVKGFYPSDIAVEWESNGQPENNYKTTPPVLDSDGSFFLYSKLTVDKSRWQQGNVFSCSVMHEALHNHYTQKSLSLSPGK

SEQ ID NO: 67 - protein, 10 aa, Artificial Sequence
  Synthetic Construct
GYTFTSYVIH

SEQ ID NO: 68 - protein, 13 aa, Artificial Sequence
  Synthetic Construct
YNDGTDYDEKFKG

SEQ ID NO: 69 - protein, 13 aa, Artificial Sequence
  Synthetic Construct
EKDNYATGAWFAY

SEQ ID NO: 70 - protein, 17 aa, Artificial Sequence
  Synthetic Construct
KSSQSLLYSTNQKNYLA

SEQ ID NO: 71 - protein, 7 aa, Artificial Sequence
  Synthetic Construct
WASTRES

SEQ ID NO: 72 - protein, 8 aa, Artificial Sequence
  Synthetic Construct
QQYYSYRT

SEQ ID NO: 73 - protein, 124 aa, Artificial Sequence
  Synthetic Construct
QVQLQQSGPEVVKPGASVKMSCKASGYTFTSYVIHWVRQKPGQGLDWIGYINPYNDGTDYDEKFKGKATLTSDTSTSTAYMELSSLRSEDTAVYYCAREKDNYATGAWFAYWGQGTLVTVSSAS

SEQ ID NO: 74 - protein, 112 aa, Artificial Sequence
  Synthetic Construct
DIVMTQSPDSLAVSLGERVTMNCKSSQSLLYSTNQKNYLAWYQQKPGQSPKLLIYWASTRESGVPDRFSGSGSGTDFTLTISSVQAEDVAVYYCQQYYSYRTFGGGTKLEIK

SEQ ID NO: 75 - protein, 452 aa, Artificial Sequence
  Synthetic Construct
QVQLQQSGPEVVKPGASVKMSCKASGYTFTSYVIHWVRQKPGQGLDWIGYINPYNDGTDYDEKFKGKATLTSDTSTSTAYMELSSLRSEDTAVYYCAREKDNYATGAWFAYWGQGTLVTVSSASTKGPSVFPLAPSSKSTSGGTAALGCLVKDYFPEPVTVSWNSGALTSGVHTFPAVLQSSGLYSLSSVVTVPSSSLGTQTYICNVNHKPSNTKVDKKVEPKSCDKTHTCPPCPAPELLGGPSVFLFPPKPKDTLMISRTPEVTCVVVDVSHEDPEVKFNWYVDGVEVHNAKTKPREEQYASTYRVVSVLTVLHQDWLNGKEYKCKVSNKALPAPIEKTISKAKGQPREPQVYTLPPSRDELTKNQVSLTCLVKGFYPSDIAVEWESNGQPENNYKTTPPVLDSDGSFFLYSKLTVDKSRWQQGNVFSCSVMHEALHNHYTQKSLSLSPGK

SEQ ID NO: 76 - protein, 449 aa, Artificial Sequence
  Synthetic Construct
QVQLQQSGPEVVKPGASVKMSCKASGYTFTSYVIHWVRQKPGQGLDWIGYINPYNDGTDYDEKFKGKATLTSDTSTSTAYMELSSLRSEDTAVYYCAREKDNYATGAWFAYWGQGTLVTVSSASTKGPSVFPLAPCSRSTSESTAALGCLVKDYFPEPVTVSWNSGALTSGVHTFPAVLQSSGLYSLSSVVTVPSSSLGTKTYTCNVDHKPSNTKVDKRVESKYGPPCPSCPAPEFLGGPSVFLFPPKPKDTLMISRTPEVTCVVVDVSQEDPEVQFNWYVDGVEVHNAKTKPREEQFNSTYRVVSVLTVLHQDWLNGKEYKCKVSNKGLPSSIEKTISKAKGQPREPQVYTLPPSQEEMTKNQVSLTCLVKGFYPSDIAVEWESNGQPENNYKTTPPVLDSDGSFFLYSRLTVDKSRWQEGNVFSCSVMHEALHNHYTQKSLSLSLGK

SEQ ID NO: 77 - protein, 219 aa, Artificial Sequence
  Synthetic Construct
DIVMTQSPDSLAVSLGERVTMNCKSSQSLLYSTNQKNYLAWYQQKPGQSPKLLIYWASTRESGVPDRFSGSGSGTDFTLTISSVQAEDVAVYYCQQYYSYRTFGGGTKLEIKRTVAAPSVFIFPPSDEQLKSGTASVVCLLNNFYPREAKVQWKVDNALQSGNSQESVTEQDSKDSTYSLSSTLTLSKADYEKHKVYACEVTHQGLSSPVTKSFNRGEC

SEQ ID NO: 78 - protein, 452 aa, Artificial Sequence
  Synthetic Construct
QVQLQQSGPEVVKPGASVKMSCKASGYTFTSYVIHWVRQKPGQGLDWIGYINPYNDGTDYDEKFKGKATLTSDTSTSTAYMELSSLRSEDTAVYYCAREKDNYATGAWFAYWGQGTLVTVSSASTKGPSVFPLAPSSKSTSGGTAALGCLVKDYFPEPVTVSWNSGALTSGVHTFPAVLQSSGLYSLSSVVTVPSSSLGTQTYICNVNHKPSNTKVDKKVEPKSCDKTHTCPPCPAPEKKGGPSVFLFPPKPKDTLMISRTPEVTCVVVDVSHEDPEVKFNWYVDGVEVHNAKTKPREEQYNSTYRVVSVLTVLHQDWLNGKEYKCKVSNKALPAPIEKTISKAKGQPREPQVYVLPPSREEMTKNQVSLLCLVKGFYPSDIAVEWESNGQPENRYMTWPPVLDSDGSFFLYSKLTVDKSRWQQGNVFSCSVMHEALHNHYTQKSLSLSPGK

SEQ ID NO: 79 - protein, 588 aa, Artificial Sequence
  Synthetic Construct
QVQLQQSGPEVVKPGASVKMSCKASGYTFTSYVIHWVRQKPGQGLDWIGYINPYNDGTDYDEKFKGKATLTSDTSTSTAYMELSSLRSEDTAVYYCAREKDNYATGAWFAYWGQGTLVTVSSASTKGPSVFPLAPSSKSTSGGTAALGCLVKDYFPEPVTVSWNSGALTSGVHTFPAVLQSSGLYSLSSVVTVPSSSLGTQTYICNVNHKPSNTKVDKKVEPKSCDKPAPTSSSTKKTQLQLEHLLLDLQMILNGINNYKNPKLTDMLTFEFYMPKKATELKHLQCLERELKPLEEVLNLAQSKNFHLRPRDLISNINVIVLELKGSETTFMCEYADETATIVEFLNRWITFCQSIISTLTDKTHTCPPCPAPEDEGGPSVFLFPPKPKDTLMISRTPEVTCVVVDVSHEDPEVKFNWYVDGVEVHNAKTKPREEQYNSTYRVVSVLTVLHQDWLNGKEYKCKVSNKALPAPIEKTISKAKGQPREPQVYVYPPSREEMTKNQVSLTCLVKGFYPSDIAVEWESNGQPENNYKTTPPVLDEDGSFALVSKLTVDKSRWQQGNVFSCSVMHEALHNHYTQKSLSLSPGK

SEQ ID NO: 80 - protein, 627 aa, Artificial Sequence
  Synthetic Construct
QVQLQQSGPEVVKPGASVKMSCKASGYTFTSYVIHWVRQKPGQGLDWIGYINPYNDGTDYDEKFKGKATLTSDTSTSTAYMELSSLRSEDTAVYYCAREKDNYATGAWFAYWGQGTLVTVSSASTKGPSVFPLAPSSKSTSGGTAALGCLVKDYFPEPVTVSWNSGALTSGVHTFPAVLQSSGLYSLSSVVTVPSSSLGTQTYICNVNHKPSNTKVDKKVEPKSCDKPGSGGGGGCDLPQTHSLGSRRTLMLLAQMRKISLFSCAKDRHDFGFPQEEFGNQFQKAETIPVLHEMIQQIFNLFSTKDSSAAWDETLLDKFYTELYQQLNDLEACVIQGVGVTETPLMKEDSILAVRKYFQRITLYLKEKKYSPCAWEVVRAEIMRSFSLSTNLQESLRSKEDKTHTCPPCPAPEDEGGPSVFLFPPKPKDTLMISRTPEVTCVVVDVSHEDPEVKFNWYVDGVEVHNAKTKPREEQYNSTYRVVSVLTVLHQDWLNGKEYKCKVSNKALPAPIEKTISKAKGQPREPQVYVYPPSREEMTKNQVSLTCLVKGFYPSDIAVEWESNGQPENNYKTTPPVLDEDGSFALVSKLTVDKSRWQQGNVFSCSVMHEALHNHYTQKSLSLSPGK

SEQ ID NO: 81 - protein, 755 aa, Artificial Sequence
  Synthetic Construct
QVQLQQSGPEVVKPGASVKMSCKASGYTFTSYVIHWVRQKPGQGLDWIGYINPYNDGTDYDEKFKGKATLTSDTSTSTAYMELSSLRSEDTAVYYCAREKDNYATGAWFAYWGQGTLVTVSSASTKGPSVFPLAPSSKSTSGGTAALGCLVKDYFPEPVTVSWNSGALTSGVHTFPAVLQSSGLYSLSSVVTVPSSSLGTQTYICNVNHKPSNTKVDKKVEPKSCDKPGSGQDPYVKEAENLKKYFNAGHSDVVDNGTLFLGILKNWKEESDRKIMQSQIVSFYFKLFKNFKDDQSIQKSVETIKEDMNVKFFNSNKKKRDDFEKLTNYSVTDLNVQRKAIHELIQVMAELSPAAKTGKRKRSQMLFRGFEGGGSGGGGSGGGGSGGGGSQDPYVKEAENLKKYFNAGHSDVVDNGTLFLGILKNWKEESDRKIMQSQIVSFYFKLFKNFKDDQSIQKSVETIKEDMNVKFFNSNKKKRDDFEKLTNYSVTDLNVQRKAIHELIQVMAELSPAAKTGKRKRSQMLFRGDKTHTCPPCPAPEDEGGPSVFLFPPKPKDTLMISRTPEVTCVVVDVSHEDPEVKFNWYVDGVEVHNAKTKPREEQYNSTYRVVSVLTVLHQDWLNGKEYKCKVSNKALPAPIEKTISKAKGQPREPQVYVYPPSREEMTKNQVSLTCLVKGFYPSDIAVEWESNGQPENNYKTTPPVLDEDGSFALVSKLTVDKSRWQQGNVFSCSVMHEALHNHYTQKSLSLSPGK

SEQ ID NO: 82 - protein, 799 aa, Artificial Sequence
  Synthetic Construct
QVQLQQSGPEVVKPGASVKMSCKASGYTFTSYVIHWVRQKPGQGLDWIGYINPYNDGTDYDEKFKGKATLTSDTSTSTAYMELSSLRSEDTAVYYCAREKDNYATGAWFAYWGQGTLVTVSSASTKGPSVFPLAPSSKSTSGGTAALGCLVKDYFPEPVTVSWNSGALTSGVHTFPAVLQSSGLYSLSSVVTVPSSSLGTQTYICNVNHKPSNTKVDKKVEPKSCDKPGSGSPGQGTQSENSCTHFPGNLPNMLRDLADAFSRVKTFFQMKDQLDNLLLKESLLEDFKGYLGCQALSEMIQFYLEEVMPQAENQDPDIKAHVNSLGENLKTLRLRLRRCHRFLPCENKSKAVEQVKNAFNKLQEKGIYKAMSEFDIFINYIEAYMTMKIRNFEGGGSGGGGSGGGGSGGGGSSPGQGTQSENSCTHFPGNLPNMLRDLADAFSRVKTFFQMKDQLDNLLLKESLLEDFKGYLGCQALSEMIQFYLEEVMPQAENQDPDIKAHVNSLGENLKTLRLRLRRCHRFLPCENKSKAVEQVKNAFNKLQEKGIYKAMSEFDIFINYIEAYMTMKIRNDKTHTCPPCPAPEDEGGPSVFLFPPKPKDTLMISRTPEVTCVVVDVSHEDPEVKFNWYVDGVEVHNAKTKPREEQYNSTYRVVSVLTVLHQDWLNGKEYKCKVSNKALPAPIEKTISKAKGQPREPQVYVYPPSREEMTKNQVSLTCLVKGFYPSDIAVEWESNGQPENNYKTTPPVLDEDGSFALVSKLTVDKSRWQQGNVFSCSVMHEALHNHYTQKSLSLSPGK

SEQ ID NO: 83 - protein, 982 aa, Artificial Sequence
  Synthetic Construct
QVQLQQSGPEVVKPGASVKMSCKASGYTFTSYVIHWVRQKPGQGLDWIGYINPYNDGTDYDEKFKGKATLTSDTSTSTAYMELSSLRSEDTAVYYCAREKDNYATGAWFAYWGQGTLVTVSSASTKGPSVFPLAPSSKSTSGGTAALGCLVKDYFPEPVTVSWNSGALTSGVHTFPAVLQSSGLYSLSSVVTVPSSSLGTQTYICNVNHKPSNTKVDKKVEPKSCDKPGSGIWELKKDVYVVELDWYPDAPGEMVVLTCDTPEEDGITWTLDQSSEVLGSGKTLTIQVKAAGDAGQYTCHKGGEVLSHSLLLLHKKEDGIWSTDILKDQKEPKNKTFLRCEAKNYSGRFTCWWLTTISTDLTFSVKSSRGSSDPQGVTCGAATLSAERVRGDNKEYEYSVECQEDSACPAAEESLPIEVMVDAVHKLKYENYTSSFFIRDIIKPDPPKNLQLKPLKNSRQVEVSWEYPDTWSTPHSYFSLTFCVQVQGKSKREKKDRVFTDKTSATVICRKNASISVRAQDRYYSSSWSEWASVPCSGGGGSGGGGSGGGGSGGGGSGRNLPVATPDPGMFPCLHHSQNLLRAVSNMLQKARQTLEFYPCTSEEIDHEDITKDKTSTVEACLPLELTKNESCLNSRETSFITNGSCLASRKTSFMMALCLSSIYEDLKMYQVEFKTMNAKLLMDPKRQIFLDQNMLAVIDELMQALNFNSETVPQKSSLEEPDFYKTKIKLCILLHAFRIRAVTIDRVMSYLNASDKTHTCPPCPAPEDEGGPSVFLFPPKPKDTLMISRTPEVTCVVVDVSHEDPEVKFNWYVDGVEVHNAKTKPREEQYNSTYRVVSVLTVLHQDWLNGKEYKCKVSNKALPAPIEKTISKAKGQPREPQVYVYPPSREEMTKNQVSLTCLVKGFYPSDIAVEWESNGQPENNYKTTPPVLDEDGSFALVSKLTVDKSRWQQGNVFSCSVMHEALHNHYTQKSLSLSPGK

SEQ ID NO: 84 - protein, 955 aa, Artificial Sequence
  Synthetic Construct
QVQLQQSGPEVVKPGASVKMSCKASGYTFTSYVIHWVRQKPGQGLDWIGYINPYNDGTDYDEKFKGKATLTSDTSTSTAYMELSSLRSEDTAVYYCAREKDNYATGAWFAYWGQGTLVTVSSASTKGPSVFPLAPSSKSTSGGTAALGCLVKDYFPEPVTVSWNSGALTSGVHTFPAVLQSSGLYSLSSVVTVPSSSLGTQTYICNVNHKPSNTKVDKKVEPKSCDKPGSGIWELKKDVYVVELDWYPDAPGEMVVLTCDTPEEDGITWTLDQSSEVLGSGKTLTIQVKAAGDAGQYTCHKGGEVLSHSLLLLHKKEDGIWSTDILKDQKEPKNKTFLRCEAKNYSGRFTCWWLTTISTDLTFSVKSSRGSSDPQGVTCGAATLSAERVRGDNKEYEYSVECQEDSACPAAEESLPIEVMVDAVHKLKYENYTSSFFIRDIIKPDPPKNLQLKPLKNSRQVEVSWEYPDTWSTPHSYFSLTFCVQVQGKSKREKKDRVFTDKTSATVICRKNASISVRAQDRYYSSSWSEWASVPCSGGGGSGGGGSGGGGSGGGGSGRAVPGGSSPAWTQCQQLSQKLCTLAWSAHPLVGHMDLREEGDEETTNDVPHIQCGDGCDPQGLRDNSQFCLQRIHQGLIFYEKLLGSDIFTGEPSLLPDSPVGQLHASLLGLSQLLQPEGHHWETQQIPSLSPSQPWQRLLLRFKILRSLQAFVAVAARVFAHGAATLSPDKTHTCPPCPAPEDEGGPSVFLFPPKPKDTLMISRTPEVTCVVVDVSHEDPEVKFNWYVDGVEVHNAKTKPREEQYNSTYRVVSVLTVLHQDWLNGKEYKCKVSNKALPAPIEKTISKAKGQPREPQVYVYPPSREEMTKNQVSLTCLVKGFYPSDIAVEWESNGQPENNYKTTPPVLDEDGSFALVSKLTVDKSRWQQGNVFSCSVMHEALHNHYTQKSLSLSPGK

SEQ ID NO: 85 - protein, 10 aa, Artificial Sequence
  Synthetic Construct
GFTFSYFWMN

SEQ ID NO: 86 - protein, 19 aa, Artificial Sequence
  Synthetic Construct
EIRLRSDNYATHYAESVKG

SEQ ID NO: 87 - protein, 6 aa, Artificial Sequence
  Synthetic Construct
DWEFTY

SEQ ID NO: 88 - protein, 10 aa, Artificial Sequence
  Synthetic Construct
SASLSVSFMH

SEQ ID NO: 89 - protein, 7 aa, Artificial Sequence
  Synthetic Construct
RTSNLAS

SEQ ID NO: 90 - protein, 8 aa, Artificial Sequence
  Synthetic Construct
QQRSSDPP

SEQ ID NO: 91 - protein, 119 aa, Artificial Sequence
  Synthetic Construct
EVQLVESGGGLVQPGRSLRLSCTASGFTFSYFWMNWVRQAPGKGLEWVGEIRLRSDNYATHYAESVKGRFTISRDDSKSIAYLQMNSLKTEDTALYYCTRDWEFTYWGQGTTVTVSSAS

SEQ ID NO: 92 - protein, 105 aa, Artificial Sequence
  Synthetic Construct
EIVMTQSPGTLSLSPGESATLSCSASLSVSFMHWFQQKPGHAPRLLIYRTSNLASGVPDRFSGSGSGTDFTLTISRLEPEDFAVYYCQQRSSDPPTFGQGTRLEI

SEQ ID NO: 93 - protein, 447 aa, Artificial Sequence
  Synthetic Construct
EVQLVESGGGLVQPGRSLRLSCTASGFTFSYFWMNWVRQAPGKGLEWVGEIRLRSDNYATHYAESVKGRFTISRDDSKSIAYLQMNSLKTEDTALYYCTRDWEFTYWGQGTTVTVSSASTKGPSVFPLAPSSKSTSGGTAALGCLVKDYFPEPVTVSWNSGALTSGVHTFPAVLQSSGLYSLSSVVTVPSSSLGTQTYICNVNHKPSNTKVDKKVEPKSCDKTHTCPPCPAPELLGGPSVFLFPPKPKDTLMISRTPEVTCVVVDVSHEDPEVKFNWYVDGVEVHNAKTKPREEQYASTYRVVSVLTVLHQDWLNGKEYKCKVSNKALPAPIEKTISKAKGQPREPQVYTLPPSRDELTKNQVSLTCLVKGFYPSDIAVEWESNGQPENNYKTTPPVLDSDGSFFLYSKLTVDKSRWQQGNVFSCSVMHEALHNHYTQKSLSLSPGK

SEQ ID NO: 94 - protein, 213 aa, Artificial Sequence
  Synthetic Construct
EIVMTQSPGTLSLSPGESATLSCSASLSVSFMHWFQQKPGHAPRLLIYRTSNLASGVPDRFSGSGSGTDFTLTISRLEPEDFAVYYCQQRSSDPPTFGQGTRLEIKRTVAAPSVFIFPPSDEQLKSGTASVVCLLNNFYPREAKVQWKVDNALQSGNSQESVTEQDSKDSTYSLSSTLTLSKADYEKHKVYACEVTHQGLSSPVTKSFNRGEC

SEQ ID NO: 95 - protein, 447 aa, Artificial Sequence
  Synthetic Construct
EVQLVESGGGLVQPGRSLRLSCTASGFTFSYFWMNWVRQAPGKGLEWVGEIRLRSDNYATHYAESVKGRFTISRDDSKSIAYLQMNSLKTEDTALYYCTRDWEFTYWGQGTTVTVSSASTKGPSVFPLAPSSKSTSGGTAALGCLVKDYFPEPVTVSWNSGALTSGVHTFPAVLQSSGLYSLSSVVTVPSSSLGTQTYICNVNHKPSNTKVDKKVEPKSCDKTHTCPPCPAPEKKGGPSVFLFPPKPKDTLMISRTPEVTCVVVDVSHEDPEVKFNWYVDGVEVHNAKTKPREEQYNSTYRVVSVLTVLHQDWLNGKEYKCKVSNKALPAPIEKTISKAKGQPREPQVYVLPPSREEMTKNQVSLLCLVKGFYPSDIAVEWESNGQPENRYMTWPPVLDSDGSFFLYSKLTVDKSRWQQGNVFSCSVMHEALHNHYTQKSLSLSPGK

SEQ ID NO: 96 - protein, 583 aa, Artificial Sequence
  Synthetic Construct
EVQLVESGGGLVQPGRSLRLSCTASGFTFSYFWMNWVRQAPGKGLEWVGEIRLRSDNYATHYAESVKGRFTISRDDSKSIAYLQMNSLKTEDTALYYCTRDWEFTYWGQGTTVTVSSASTKGPSVFPLAPSSKSTSGGTAALGCLVKDYFPEPVTVSWNSGALTSGVHTFPAVLQSSGLYSLSSVVTVPSSSLGTQTYICNVNHKPSNTKVDKKVEPKSCDKPAPTSSSTKKTQLQLEHLLLDLQMILNGINNYKNPKLTDMLTFEFYMPKKATELKHLQCLERELKPLEEVLNLAQSKNFHLRPRDLISNINVIVLELKGSETTFMCEYADETATIVEFLNRWITFCQSIISTLTDKTHTCPPCPAPEDEGGPSVFLFPPKPKDTLMISRTPEVTCVVVDVSHEDPEVKFNWYVDGVEVHNAKTKPREEQYNSTYRVVSVLTVLHQDWLNGKEYKCKVSNKALPAPIEKTISKAKGQPREPQVYVYPPSREEMTKNQVSLTCLVKGFYPSDIAVEWESNGQPENNYKTTPPVLDEDGSFALVSKLTVDKSRWQQGNVFSCSVMHEALHNHYTQKSLSLSPGK

SEQ ID NO: 97 - protein, 622 aa, Artificial Sequence
  Synthetic Construct
EVQLVESGGGLVQPGRSLRLSCTASGFTFSYFWMNWVRQAPGKGLEWVGEIRLRSDNYATHYAESVKGRFTISRDDSKSIAYLQMNSLKTEDTALYYCTRDWEFTYWGQGTTVTVSSASTKGPSVFPLAPSSKSTSGGTAALGCLVKDYFPEPVTVSWNSGALTSGVHTFPAVLQSSGLYSLSSVVTVPSSSLGTQTYICNVNHKPSNTKVDKKVEPKSCDKPGSGGGGGCDLPQTHSLGSRRTLMLLAQMRKISLFSCAKDRHDFGFPQEEFGNQFQKAETIPVLHEMIQQIFNLFSTKDSSAAWDETLLDKFYTELYQQLNDLEACVIQGVGVTETPLMKEDSILAVRKYFQRITLYLKEKKYSPCAWEVVRAEIMRSFSLSTNLQESLRSKEDKTHTCPPCPAPEDEGGPSVFLFPPKPKDTLMISRTPEVTCVVVDVSHEDPEVKFNWYVDGVEVHNAKTKPREEQYNSTYRVVSVLTVLHQDWLNGKEYKCKVSNKALPAPIEKTISKAKGQPREPQVYVYPPSREEMTKNQVSLTCLVKGFYPSDIAVEWESNGQPENNYKTTPPVLDEDGSFALVSKLTVDKSRWQQGNVFSCSVMHEALHNHYTQKSLSLSPGK

SEQ ID NO: 98 - protein, 750 aa, Artificial Sequence
  Synthetic Construct
EVQLVESGGGLVQPGRSLRLSCTASGFTFSYFWMNWVRQAPGKGLEWVGEIRLRSDNYATHYAESVKGRFTISRDDSKSIAYLQMNSLKTEDTALYYCTRDWEFTYWGQGTTVTVSSASTKGPSVFPLAPSSKSTSGGTAALGCLVKDYFPEPVTVSWNSGALTSGVHTFPAVLQSSGLYSLSSVVTVPSSSLGTQTYICNVNHKPSNTKVDKKVEPKSCDKPGSGQDPYVKEAENLKKYFNAGHSDVVDNGTLFLGILKNWKEESDRKIMQSQIVSFYFKLFKNFKDDQSIQKSVETIKEDMNVKFFNSNKKKRDDFEKLTNYSVTDLNVQRKAIHELIQVMAELSPAAKTGKRKRSQMLFRGFEGGGSGGGGSGGGGSGGGGSQDPYVKEAENLKKYFNAGHSDVVDNGTLFLGILKNWKEESDRKIMQSQIVSFYFKLFKNFKDDQSIQKSVETIKEDMNVKFFNSNKKKRDDFEKLTNYSVTDLNVQRKAIHELIQVMAELSPAAKTGKRKRSQMLFRGDKTHTCPPCPAPEDEGGPSVFLFPPKPKDTLMISRTPEVTCVVVDVSHEDPEVKFNWYVDGVEVHNAKTKPREEQYNSTYRVVSVLTVLHQDWLNGKEYKCKVSNKALPAPIEKTISKAKGQPREPQVYVYPPSREEMTKNQVSLTCLVKGFYPSDIAVEWESNGQPENNYKTTPPVLDEDGSFALVSKLTVDKSRWQQGNVFSCSVMHEALHNHYTQKSLSLSPGK

SEQ ID NO: 99 - protein, 794 aa, Artificial Sequence
  Synthetic Construct
EVQLVESGGGLVQPGRSLRLSCTASGFTFSYFWMNWVRQAPGKGLEWVGEIRLRSDNYATHYAESVKGRFTISRDDSKSIAYLQMNSLKTEDTALYYCTRDWEFTYWGQGTTVTVSSASTKGPSVFPLAPSSKSTSGGTAALGCLVKDYFPEPVTVSWNSGALTSGVHTFPAVLQSSGLYSLSSVVTVPSSSLGTQTYICNVNHKPSNTKVDKKVEPKSCDKPGSGSPGQGTQSENSCTHFPGNLPNMLRDLADAFSRVKTFFQMKDQLDNLLLKESLLEDFKGYLGCQALSEMIQFYLEEVMPQAENQDPDIKAHVNSLGENLKTLRLRLRRCHRFLPCENKSKAVEQVKNAFNKLQEKGIYKAMSEFDIFINYIEAYMTMKIRNFEGGGSGGGGSGGGGSGGGGSSPGQGTQSENSCTHFPGNLPNMLRDLADAFSRVKTFFQMKDQLDNLLLKESLLEDFKGYLGCQALSEMIQFYLEEVMPQAENQDPDIKAHVNSLGENLKTLRLRLRRCHRFLPCENKSKAVEQVKNAFNKLQEKGIYKAMSEFDIFINYIEAYMTMKIRNDKTHTCPPCPAPEDEGGPSVFLFPPKPKDTLMISRTPEVTCVVVDVSHEDPEVKFNWYVDGVEVHNAKTKPREEQYNSTYRVVSVLTVLHQDWLNGKEYKCKVSNKALPAPIEKTISKAKGQPREPQVYVYPPSREEMTKNQVSLTCLVKGFYPSDIAVEWESNGQPENNYKTTPPVLDEDGSFALVSKLTVDKSRWQQGNVFSCSVMHEALHNHYTQKSLSLSPGK

SEQ ID NO: 100 - protein, 977 aa, Artificial Sequence
  Synthetic Construct
EVQLVESGGGLVQPGRSLRLSCTASGFTFSYFWMNWVRQAPGKGLEWVGEIRLRSDNYATHYAESVKGRFTISRDDSKSIAYLQMNSLKTEDTALYYCTRDWEFTYWGQGTTVTVSSASTKGPSVFPLAPSSKSTSGGTAALGCLVKDYFPEPVTVSWNSGALTSGVHTFPAVLQSSGLYSLSSVVTVPSSSLGTQTYICNVNHKPSNTKVDKKVEPKSCDKPGSGIWELKKDVYVVELDWYPDAPGEMVVLTCDTPEEDGITWTLDQSSEVLGSGKTLTIQVKAAGDAGQYTCHKGGEVLSHSLLLLHKKEDGIWSTDILKDQKEPKNKTFLRCEAKNYSGRFTCWWLTTISTDLTFSVKSSRGSSDPQGVTCGAATLSAERVRGDNKEYEYSVECQEDSACPAAEESLPIEVMVDAVHKLKYENYTSSFFIRDIIKPDPPKNLQLKPLKNSRQVEVSWEYPDTWSTPHSYFSLTFCVQVQGKSKREKKDRVFTDKTSATVICRKNASISVRAQDRYYSSSWSEWASVPCSGGGGSGGGGSGGGGSGGGGSGRNLPVATPDPGMFPCLHHSQNLLRAVSNMLQKARQTLEFYPCTSEEIDHEDITKDKTSTVEACLPLELTKNESCLNSRETSFITNGSCLASRKTSFMMALCLSSIYEDLKMYQVEFKTMNAKLLMDPKRQIFLDQNMLAVIDELMQALNFNSETVPQKSSLEEPDFYKTKIKLCILLHAFRIRAVTIDRVMSYLNASDKTHTCPPCPAPEDEGGPSVFLFPPKPKDTLMISRTPEVTCVVVDVSHEDPEVKFNWYVDGVEVHNAKTKPREEQYNSTYRVVSVLTVLHQDWLNGKEYKCKVSNKALPAPIEKTISKAKGQPREPQVYVYPPSREEMTKNQVSLTCLVKGFYPSDIAVEWESNGQPENNYKTTPPVLDEDGSFALVSKLTVDKSRWQQGNVFSCSVMHEALHNHYTQKSLSLSPGK

SEQ ID NO: 101 - protein, 950 aa, Artificial Sequence
  Synthetic Construct
EVQLVESGGGLVQPGRSLRLSCTASGFTFSYFWMNWVRQAPGKGLEWVGEIRLRSDNYATHYAESVKGRFTISRDDSKSIAYLQMNSLKTEDTALYYCTRDWEFTYWGQGTTVTVSSASTKGPSVFPLAPSSKSTSGGTAALGCLVKDYFPEPVTVSWNSGALTSGVHTFPAVLQSSGLYSLSSVVTVPSSSLGTQTYICNVNHKPSNTKVDKKVEPKSCDKPGSGIWELKKDVYVVELDWYPDAPGEMVVLTCDTPEEDGITWTLDQSSEVLGSGKTLTIQVKAAGDAGQYTCHKGGEVLSHSLLLLHKKEDGIWSTDILKDQKEPKNKTFLRCEAKNYSGRFTCWWLTTISTDLTFSVKSSRGSSDPQGVTCGAATLSAERVRGDNKEYEYSVECQEDSACPAAEESLPIEVMVDAVHKLKYENYTSSFFIRDIIKPDPPKNLQLKPLKNSRQVEVSWEYPDTWSTPHSYFSLTFCVQVQGKSKREKKDRVFTDKTSATVICRKNASISVRAQDRYYSSSWSEWASVPCSGGGGSGGGGSGGGGSGGGGSGRAVPGGSSPAWTQCQQLSQKLCTLAWSAHPLVGHMDLREEGDEETTNDVPHIQCGDGCDPQGLRDNSQFCLQRIHQGLIFYEKLLGSDIFTGEPSLLPDSPVGQLHASLLGLSQLLQPEGHHWETQQIPSLSPSQPWQRLLLRFKILRSLQAFVAVAARVFAHGAATLSPDKTHTCPPCPAPEDEGGPSVFLFPPKPKDTLMISRTPEVTCVVVDVSHEDPEVKFNWYVDGVEVHNAKTKPREEQYNSTYRVVSVLTVLHQDWLNGKEYKCKVSNKALPAPIEKTISKAKGQPREPQVYVYPPSREEMTKNQVSLTCLVKGFYPSDIAVEWESNGQPENNYKTTPPVLDEDGSFALVSKLTVDKSRWQQGNVFSCSVMHEALHNHYTQKSLSLSPGK

SEQ ID NO: 102 - protein, 115 aa, Artificial Sequence
  Synthetic Construct
QVQLVESGGGVVQPGRSLRLDCKASGITFSNSGMHWVRQAPGKGLEWVAVIWYDGSKRYYADSVKGRFTISRDNSKNTLFLQMNSLRAEDTAVYYCATNDDYWGQGTLVTVSSAS

SEQ ID NO: 103 - protein, 106 aa, Artificial Sequence
  Synthetic Construct
EIVLTQSPATLSLSPGERATLSCRASQSVSSYLAWYQQKPGQAPRLLIYDASNRATGIPARFSGSGSGTDFTLTISSLEPEDFAVYYCQQSSNWPRTFGQGTKVEI

SEQ ID NO: 104 - protein, 443 aa, Artificial Sequence
  Synthetic Construct
QVQLVESGGGVVQPGRSLRLDCKASGITFSNSGMHWVRQAPGKGLEWVAVIWYDGSKRYYADSVKGRFTISRDNSKNTLFLQMNSLRAEDTAVYYCATNDDYWGQGTLVTVSSASTKGPSVFPLAPSSKSTSGGTAALGCLVKDYFPEPVTVSWNSGALTSGVHTFPAVLQSSGLYSLSSVVTVPSSSLGTQTYICNVNHKPSNTKVDKKVEPKSCDKTHTCPPCPAPELLGGPSVFLFPPKPKDTLMISRTPEVTCVVVDVSHEDPEVKFNWYVDGVEVHNAKTKPREEQYASTYRVVSVLTVLHQDWLNGKEYKCKVSNKALPAPIEKTISKAKGQPREPQVYTLPPSRDELTKNQVSLTCLVKGFYPSDIAVEWESNGQPENNYKTTPPVLDSDGSFFLYSKLTVDKSRWQQGNVFSCSVMHEALHNHYTQKSLSLSPGK

SEQ ID NO: 105 - protein, 440 aa, Artificial Sequence
  Synthetic Construct
QVQLVESGGGVVQPGRSLRLDCKASGITFSNSGMHWVRQAPGKGLEWVAVIWYDGSKRYYADSVKGRFTISRDNSKNTLFLQMNSLRAEDTAVYYCATNDDYWGQGTLVTVSSASTKGPSVFPLAPCSRSTSESTAALGCLVKDYFPEPVTVSWNSGALTSGVHTFPAVLQSSGLYSLSSVVTVPSSSLGTKTYTCNVDHKPSNTKVDKRVESKYGPPCPPCPAPEFLGGPSVFLFPPKPKDTLMISRTPEVTCVVVDVSQEDPEVQFNWYVDGVEVHNAKTKPREEQFNSTYRVVSVLTVLHQDWLNGKEYKCKVSNKGLPSSIEKTISKAKGQPREPQVYTLPPSQEEMTKNQVSLTCLVKGFYPSDIAVEWESNGQPENNYKTTPPVLDSDGSFFLYSRLTVDKSRWQEGNVFSCSVMHEALHNHYTQKSLSLSLGK

SEQ ID NO: 106 - protein, 214 aa, Artificial Sequence
  Synthetic Construct
EIVLTQSPATLSLSPGERATLSCRASQSVSSYLAWYQQKPGQAPRLLIYDASNRATGIPARFSGSGSGTDFTLTISSLEPEDFAVYYCQQSSNWPRTFGQGTKVEIKRTVAAPSVFIFPPSDEQLKSGTASVVCLLNNFYPREAKVQWKVDNALQSGNSQESVTEQDSKDSTYSLSSTLTLSKADYEKHKVYACEVTHQGLSSPVTKSFNRGEC

SEQ ID NO: 107 - protein, 443 aa, Artificial Sequence
  Synthetic Construct
QVQLVESGGGVVQPGRSLRLDCKASGITFSNSGMHWVRQAPGKGLEWVAVIWYDGSKRYYADSVKGRFTISRDNSKNTLFLQMNSLRAEDTAVYYCATNDDYWGQGTLVTVSSASTKGPSVFPLAPSSKSTSGGTAALGCLVKDYFPEPVTVSWNSGALTSGVHTFPAVLQSSGLYSLSSVVTVPSSSLGTQTYICNVNHKPSNTKVDKKVEPKSCDKTHTCPPCPAPEKKGGPSVFLFPPKPKDTLMISRTPEVTCVVVDVSHEDPEVKFNWYVDGVEVHNAKTKPREEQYNSTYRVVSVLTVLHQDWLNGKEYKCKVSNKALPAPIEKTISKAKGQPREPQVYVLPPSREEMTKNQVSLLCLVKGFYPSDIAVEWESNGQPENRYMTWPPVLDSDGSFFLYSKLTVDKSRWQQGNVFSCSVMHEALHNHYTQKSLSLSPGK

SEQ ID NO: 108 - protein, 579 aa, Artificial Sequence
  Synthetic Construct
QVQLVESGGGVVQPGRSLRLDCKASGITFSNSGMHWVRQAPGKGLEWVAVIWYDGSKRYYADSVKGRFTISRDNSKNTLFLQMNSLRAEDTAVYYCATNDDYWGQGTLVTVSSASTKGPSVFPLAPSSKSTSGGTAALGCLVKDYFPEPVTVSWNSGALTSGVHTFPAVLQSSGLYSLSSVVTVPSSSLGTQTYICNVNHKPSNTKVDKKVEPKSCDKPAPTSSSTKKTQLQLEHLLLDLQMILNGINNYKNPKLTDMLTFEFYMPKKATELKHLQCLERELKPLEEVLNLAQSKNFHLRPRDLISNINVIVLELKGSETTFMCEYADETATIVEFLNRWITFCQSIISTLTDKTHTCPPCPAPEDEGGPSVFLFPPKPKDTLMISRTPEVTCVVVDVSHEDPEVKFNWYVDGVEVHNAKTKPREEQYNSTYRVVSVLTVLHQDWLNGKEYKCKVSNKALPAPIEKTISKAKGQPREPQVYVYPPSREEMTKNQVSLTCLVKGFYPSDIAVEWESNGQPENNYKTTPPVLDEDGSFALVSKLTVDKSRWQQGNVFSCSVMHEALHNHYTQKSLSLSPGK

SEQ ID NO: 109 - protein, 618 aa, Artificial Sequence
  Synthetic Construct
QVQLVESGGGVVQPGRSLRLDCKASGITFSNSGMHWVRQAPGKGLEWVAVIWYDGSKRYYADSVKGRFTISRDNSKNTLFLQMNSLRAEDTAVYYCATNDDYWGQGTLVTVSSASTKGPSVFPLAPSSKSTSGGTAALGCLVKDYFPEPVTVSWNSGALTSGVHTFPAVLQSSGLYSLSSVVTVPSSSLGTQTYICNVNHKPSNTKVDKKVEPKSCDKPGSGGGGGCDLPQTHSLGSRRTLMLLAQMRKISLFSCAKDRHDFGFPQEEFGNQFQKAETIPVLHEMIQQIFNLFSTKDSSAAWDETLLDKFYTELYQQLNDLEACVIQGVGVTETPLMKEDSILAVRKYFQRITLYLKEKKYSPCAWEVVRAEIMRSFSLSTNLQESLRSKEDKTHTCPPCPAPEDEGGPSVFLFPPKPKDTLMISRTPEVTCVVVDVSHEDPEVKFNWYVDGVEVHNAKTKPREEQYNSTYRVVSVLTVLHQDWLNGKEYKCKVSNKALPAPIEKTISKAKGQPREPQVYVYPPSREEMTKNQVSLTCLVKGFYPSDIAVEWESNGQPENNYKTTPPVLDEDGSFALVSKLTVDKSRWQQGNVFSCSVMHEALHNHYTQKSLSLSPGK

SEQ ID NO: 110 - protein, 746 aa, Artificial Sequence
  Synthetic Construct
QVQLVESGGGVVQPGRSLRLDCKASGITFSNSGMHWVRQAPGKGLEWVAVIWYDGSKRYYADSVKGRFTISRDNSKNTLFLQMNSLRAEDTAVYYCATNDDYWGQGTLVTVSSASTKGPSVFPLAPSSKSTSGGTAALGCLVKDYFPEPVTVSWNSGALTSGVHTFPAVLQSSGLYSLSSVVTVPSSSLGTQTYICNVNHKPSNTKVDKKVEPKSCDKPGSGQDPYVKEAENLKKYFNAGHSDVVDNGTLFLGILKNWKEESDRKIMQSQIVSFYFKLFKNFKDDQSIQKSVETIKEDMNVKFFNSNKKKRDDFEKLTNYSVTDLNVQRKAIHELIQVMAELSPAAKTGKRKRSQMLFRGFEGGGSGGGGSGGGGSGGGGSQDPYVKEAENLKKYFNAGHSDVVDNGTLFLGILKNWKEESDRKIMQSQIVSFYFKLFKNFKDDQSIQKSVETIKEDMNVKFFNSNKKKRDDFEKLTNYSVTDLNVQRKAIHELIQVMAELSPAAKTGKRKRSQMLFRGDKTHTCPPCPAPEDEGGPSVFLFPPKPKDTLMISRTPEVTCVVVDVSHEDPEVKFNWYVDGVEVHNAKTKPREEQYNSTYRVVSVLTVLHQDWLNGKEYKCKVSNKALPAPIEKTISKAKGQPREPQVYVYPPSREEMTKNQVSLTCLVKGFYPSDIAVEWESNGQPENNYKTTPPVLDEDGSFALVSKLTVDKSRWQQGNVFSCSVMHEALHNHYTQKSLSLSPGK

SEQ ID NO: 111 - protein, 790 aa, Artificial Sequence
  Synthetic Construct
QVQLVESGGGVVQPGRSLRLDCKASGITFSNSGMHWVRQAPGKGLEWVAVIWYDGSKRYYADSVKGRFTISRDNSKNTLFLQMNSLRAEDTAVYYCATNDDYWGQGTLVTVSSASTKGPSVFPLAPSSKSTSGGTAALGCLVKDYFPEPVTVSWNSGALTSGVHTFPAVLQSSGLYSLSSVVTVPSSSLGTQTYICNVNHKPSNTKVDKKVEPKSCDKPGSGSPGQGTQSENSCTHFPGNLPNMLRDLADAFSRVKTFFQMKDQLDNLLLKESLLEDFKGYLGCQALSEMIQFYLEEVMPQAENQDPDIKAHVNSLGENLKTLRLRLRRCHRFLPCENKSKAVEQVKNAFNKLQEKGIYKAMSEFDIFINYIEAYMTMKIRNFEGGGSGGGGSGGGGSGGGGSSPGQGTQSENSCTHFPGNLPNMLRDLADAFSRVKTFFQMKDQLDNLLLKESLLEDFKGYLGCQALSEMIQFYLEEVMPQAENQDPDIKAHVNSLGENLKTLRLRLRRCHRFLPCENKSKAVEQVKNAFNKLQEKGIYKAMSEFDIFINYIEAYMTMKIRNDKTHTCPPCPAPEDEGGPSVFLFPPKPKDTLMISRTPEVTCVVVDVSHEDPEVKFNWYVDGVEVHNAKTKPREEQYNSTYRVVSVLTVLHQDWLNGKEYKCKVSNKALPAPIEKTISKAKGQPREPQVYVYPPSREEMTKNQVSLTCLVKGFYPSDIAVEWESNGQPENNYKTTPPVLDEDGSFALVSKLTVDKSRWQQGNVFSCSVMHEALHNHYTQKSLSLSPGK

SEQ ID NO: 112 - protein, 973 aa, Artificial Sequence
  Synthetic Construct
QVQLVESGGGVVQPGRSLRLDCKASGITFSNSGMHWVRQAPGKGLEWVAVIWYDGSKRYYADSVKGRFTISRDNSKNTLFLQMNSLRAEDTAVYYCATNDDYWGQGTLVTVSSASTKGPSVFPLAPSSKSTSGGTAALGCLVKDYFPEPVTVSWNSGALTSGVHTFPAVLQSSGLYSLSSVVTVPSSSLGTQTYICNVNHKPSNTKVDKKVEPKSCDKPGSGIWELKKDVYVVELDWYPDAPGEMVVLTCDTPEEDGITWTLDQSSEVLGSGKTLTIQVKAAGDAGQYTCHKGGEVLSHSLLLLHKKEDGIWSTDILKDQKEPKNKTFLRCEAKNYSGRFTCWWLTTISTDLTFSVKSSRGSSDPQGVTCGAATLSAERVRGDNKEYEYSVECQEDSACPAAEESLPIEVMVDAVHKLKYENYTSSFFIRDIIKPDPPKNLQLKPLKNSRQVEVSWEYPDTWSTPHSYFSLTFCVQVQGKSKREKKDRVFTDKTSATVICRKNASISVRAQDRYYSSSWSEWASVPCSGGGGSGGGGSGGGGSGGGGSGRNLPVATPDPGMFPCLHHSQNLLRAVSNMLQKARQTLEFYPCTSEEIDHEDITKDKTSTVEACLPLELTKNESCLNSRETSFITNGSCLASRKTSFMMALCLSSIYEDLKMYQVEFKTMNAKLLMDPKRQIFLDQNMLAVIDELMQALNFNSETVPQKSSLEEPDFYKTKIKLCILLHAFRIRAVTIDRVMSYLNASDKTHTCPPCPAPEDEGGPSVFLFPPKPKDTLMISRTPEVTCVVVDVSHEDPEVKFNWYVDGVEVHNAKTKPREEQYNSTYRVVSVLTVLHQDWLNGKEYKCKVSNKALPAPIEKTISKAKGQPREPQVYVYPPSREEMTKNQVSLTCLVKGFYPSDIAVEWESNGQPENNYKTTPPVLDEDGSFALVSKLTVDKSRWQQGNVFSCSVMHEALHNHYTQKSLSLSPGK

SEQ ID NO: 113 - protein, 946 aa, Artificial Sequence
  Synthetic Construct
QVQLVESGGGVVQPGRSLRLDCKASGITFSNSGMHWVRQAPGKGLEWVAVIWYDGSKRYYADSVKGRFTISRDNSKNTLFLQMNSLRAEDTAVYYCATNDDYWGQGTLVTVSSASTKGPSVFPLAPSSKSTSGGTAALGCLVKDYFPEPVTVSWNSGALTSGVHTFPAVLQSSGLYSLSSVVTVPSSSLGTQTYICNVNHKPSNTKVDKKVEPKSCDKPGSGIWELKKDVYVVELDWYPDAPGEMVVLTCDTPEEDGITWTLDQSSEVLGSGKTLTIQVKAAGDAGQYTCHKGGEVLSHSLLLLHKKEDGIWSTDILKDQKEPKNKTFLRCEAKNYSGRFTCWWLTTISTDLTFSVKSSRGSSDPQGVTCGAATLSAERVRGDNKEYEYSVECQEDSACPAAEESLPIEVMVDAVHKLKYENYTSSFFIRDIIKPDPPKNLQLKPLKNSRQVEVSWEYPDTWSTPHSYFSLTFCVQVQGKSKREKKDRVFTDKTSATVICRKNASISVRAQDRYYSSSWSEWASVPCSGGGGSGGGGSGGGGSGGGGSGRAVPGGSSPAWTQCQQLSQKLCTLAWSAHPLVGHMDLREEGDEETTNDVPHIQCGDGCDPQGLRDNSQFCLQRIHQGLIFYEKLLGSDIFTGEPSLLPDSPVGQLHASLLGLSQLLQPEGHHWETQQIPSLSPSQPWQRLLLRFKILRSLQAFVAVAARVFAHGAATLSPDKTHTCPPCPAPEDEGGPSVFLFPPKPKDTLMISRTPEVTCVVVDVSHEDPEVKFNWYVDGVEVHNAKTKPREEQYNSTYRVVSVLTVLHQDWLNGKEYKCKVSNKALPAPIEKTISKAKGQPREPQVYVYPPSREEMTKNQVSLTCLVKGFYPSDIAVEWESNGQPENNYKTTPPVLDEDGSFALVSKLTVDKSRWQQGNVFSCSVMHEALHNHYTQKSLSLSPGK

SEQ ID NO: 114 - protein, 121 aa, Artificial Sequence
  Synthetic Construct
EVQLQQSGPELVKPGASVKMSCKASGYTFTDYYMKWVKQSHGKSLEWIGHINPNNDDTFYTQKFKGRATLTVDKSSSTAYMQLNSLTSEDSAVYYCVRDDYDGGWFAYWGQGTLVTVSSAS

SEQ ID NO: 115 - protein, 106 aa, Artificial Sequence
  Synthetic Construct
DIQMTQTTSSLSASLGDRVTISCRASQDINNYLNWYQQKSDGTIKLLIYYTSRSYSGVPSRFSGSGSGTDYSLTISNRRQEDIATYFCQQGKTLPWTFGGGTKLEI

SEQ ID NO: 116 - protein, 449 aa, Artificial Sequence
  Synthetic Construct
EVQLQQSGPELVKPGASVKMSCKASGYTFTDYYMKWVKQSHGKSLEWIGHINPNNDDTFYTQKFKGRATLTVDKSSSTAYMQLNSLTSEDSAVYYCVRDDYDGGWFAYWGQGTLVTVSSASTKGPSVFPLAPSSKSTSGGTAALGCLVKDYFPEPVTVSWNSGALTSGVHTFPAVLQSSGLYSLSSVVTVPSSSLGTQTYICNVNHKPSNTKVDKKVEPKSCDKTHTCPPCPAPELLGGPSVFLFPPKPKDTLMISRTPEVTCVVVDVSHEDPEVKFNWYVDGVEVHNAKTKPREEQYASTYRVVSVLTVLHQDWLNGKEYKCKVSNKALPAPIEKTISKAKGQPREPQVYTLPPSRDELTKNQVSLTCLVKGFYPSDIAVEWESNGQPENNYKTTPPVLDSDGSFFLYSKLTVDKSRWQQGNVFSCSVMHEALHNHYTQKSLSLSPGK

SEQ ID NO: 117 - protein, 214 aa, Artificial Sequence
  Synthetic Construct
DIQMTQTTSSLSASLGDRVTISCRASQDINNYLNWYQQKSDGTIKLLIYYTSRSYSGVPSRFSGSGSGTDYSLTISNRRQEDIATYFCQQGKTLPWTFGGGTKLEIKRTVAAPSVFIFPPSDEQLKSGTASVVCLLNNFYPREAKVQWKVDNALQSGNSQESVTEQDSKDSTYSLSSTLTLSKADYEKHKVYACEVTHQGLSSPVTKSFNRGEC

SEQ ID NO: 118 - protein, 449 aa, Artificial Sequence
  Synthetic Construct
EVQLQQSGPELVKPGASVKMSCKASGYTFTDYYMKWVKQSHGKSLEWIGHINPNNDDTFYTQKFKGRATLTVDKSSSTAYMQLNSLTSEDSAVYYCVRDDYDGGWFAYWGQGTLVTVSSASTKGPSVFPLAPSSKSTSGGTAALGCLVKDYFPEPVTVSWNSGALTSGVHTFPAVLQSSGLYSLSSVVTVPSSSLGTQTYICNVNHKPSNTKVDKKVEPKSCDKTHTCPPCPAPEKKGGPSVFLFPPKPKDTLMISRTPEVTCVVVDVSHEDPEVKFNWYVDGVEVHNAKTKPREEQYNSTYRVVSVLTVLHQDWLNGKEYKCKVSNKALPAPIEKTISKAKGQPREPQVYVLPPSREEMTKNQVSLLCLVKGFYPSDIAVEWESNGQPENRYMTWPPVLDSDGSFFLYSKLTVDKSRWQQGNVFSCSVMHEALHNHYTQKSLSLSPGK

SEQ ID NO: 119 - protein, 585 aa, Artificial Sequence
  Synthetic Construct
EVQLQQSGPELVKPGASVKMSCKASGYTFTDYYMKWVKQSHGKSLEWIGHINPNNDDTFYTQKFKGRATLTVDKSSSTAYMQLNSLTSEDSAVYYCVRDDYDGGWFAYWGQGTLVTVSSASTKGPSVFPLAPSSKSTSGGTAALGCLVKDYFPEPVTVSWNSGALTSGVHTFPAVLQSSGLYSLSSVVTVPSSSLGTQTYICNVNHKPSNTKVDKKVEPKSCDKPAPTSSSTKKTQLQLEHLLLDLQMILNGINNYKNPKLTDMLTFEFYMPKKATELKHLQCLERELKPLEEVLNLAQSKNFHLRPRDLISNINVIVLELKGSETTFMCEYADETATIVEFLNRWITFCQSIISTLTDKTHTCPPCPAPEDEGGPSVFLFPPKPKDTLMISRTPEVTCVVVDVSHEDPEVKFNWYVDGVEVHNAKTKPREEQYNSTYRVVSVLTVLHQDWLNGKEYKCKVSNKALPAPIEKTISKAKGQPREPQVYVYPPSREEMTKNQVSLTCLVKGFYPSDIAVEWESNGQPENNYKTTPPVLDEDGSFALVSKLTVDKSRWQQGNVFSCSVMHEALHNHYTQKSLSLSPGK

SEQ ID NO: 120 - protein, 624 aa, Artificial Sequence
  Synthetic Construct
EVQLQQSGPELVKPGASVKMSCKASGYTFTDYYMKWVKQSHGKSLEWIGHINPNNDDTFYTQKFKGRATLTVDKSSSTAYMQLNSLTSEDSAVYYCVRDDYDGGWFAYWGQGTLVTVSSASTKGPSVFPLAPSSKSTSGGTAALGCLVKDYFPEPVTVSWNSGALTSGVHTFPAVLQSSGLYSLSSVVTVPSSSLGTQTYICNVNHKPSNTKVDKKVEPKSCDKPGSGGGGGCDLPQTHSLGSRRTLMLLAQMRKISLFSCAKDRHDFGFPQEEFGNQFQKAETIPVLHEMIQQIFNLFSTKDSSAAWDETLLDKFYTELYQQLNDLEACVIQGVGVTETPLMKEDSILAVRKYFQRITLYLKEKKYSPCAWEVVRAEIMRSFSLSTNLQESLRSKEDKTHTCPPCPAPEDEGGPSVFLFPPKPKDTLMISRTPEVTCVVVDVSHEDPEVKFNWYVDGVEVHNAKTKPREEQYNSTYRVVSVLTVLHQDWLNGKEYKCKVSNKALPAPIEKTISKAKGQPREPQVYVYPPSREEMTKNQVSLTCLVKGFYPSDIAVEWESNGQPENNYKTTPPVLDEDGSFALVSKLTVDKSRWQQGNVFSCSVMHEALHNHYTQKSLSLSPGK

SEQ ID NO: 121 - protein, 752 aa, Artificial Sequence
  Synthetic Construct
EVQLQQSGPELVKPGASVKMSCKASGYTFTDYYMKWVKQSHGKSLEWIGHINPNNDDTFYTQKFKGRATLTVDKSSSTAYMQLNSLTSEDSAVYYCVRDDYDGGWFAYWGQGTLVTVSSASTKGPSVFPLAPSSKSTSGGTAALGCLVKDYFPEPVTVSWNSGALTSGVHTFPAVLQSSGLYSLSSVVTVPSSSLGTQTYICNVNHKPSNTKVDKKVEPKSCDKPGSGQDPYVKEAENLKKYFNAGHSDVVDNGTLFLGILKNWKEESDRKIMQSQIVSFYFKLFKNFKDDQSIQKSVETIKEDMNVKFFNSNKKKRDDFEKLTNYSVTDLNVQRKAIHELIQVMAELSPAAKTGKRKRSQMLFRGFEGGGSGGGGSGGGGSGGGGSQDPYVKEAENLKKYFNAGHSDVVDNGTLFLGILKNWKEESDRKIMQSQIVSFYFKLFKNFKDDQSIQKSVETIKEDMNVKFFNSNKKKRDDFEKLTNYSVTDLNVQRKAIHELIQVMAELSPAAKTGKRKRSQMLFRGDKTHTCPPCPAPEDEGGPSVFLFPPKPKDTLMISRTPEVTCVVVDVSHEDPEVKFNWYVDGVEVHNAKTKPREEQYNSTYRVVSVLTVLHQDWLNGKEYKCKVSNKALPAPIEKTISKAKGQPREPQVYVYPPSREEMTKNQVSLTCLVKGFYPSDIAVEWESNGQPENNYKTTPPVLDEDGSFALVSKLTVDKSRWQQGNVFSCSVMHEALHNHYTQKSLSLSPGK

SEQ ID NO: 122 - protein, 796 aa, Artificial Sequence
  Synthetic Construct
EVQLQQSGPELVKPGASVKMSCKASGYTFTDYYMKWVKQSHGKSLEWIGHINPNNDDTFYTQKFKGRATLTVDKSSSTAYMQLNSLTSEDSAVYYCVRDDYDGGWFAYWGQGTLVTVSSASTKGPSVFPLAPSSKSTSGGTAALGCLVKDYFPEPVTVSWNSGALTSGVHTFPAVLQSSGLYSLSSVVTVPSSSLGTQTYICNVNHKPSNTKVDKKVEPKSCDKPGSGSPGQGTQSENSCTHFPGNLPNMLRDLADAFSRVKTFFQMKDQLDNLLLKESLLEDFKGYLGCQALSEMIQFYLEEVMPQAENQDPDIKAHVNSLGENLKTLRLRLRRCHRFLPCENKSKAVEQVKNAFNKLQEKGIYKAMSEFDIFINYIEAYMTMKIRNFEGGGSGGGGSGGGGSGGGGSSPGQGTQSENSCTHFPGNLPNMLRDLADAFSRVKTFFQMKDQLDNLLLKESLLEDFKGYLGCQALSEMIQFYLEEVMPQAENQDPDIKAHVNSLGENLKTLRLRLRRCHRFLPCENKSKAVEQVKNAFNKLQEKGIYKAMSEFDIFINYIEAYMTMKIRNDKTHTCPPCPAPEDEGGPSVFLFPPKPKDTLMISRTPEVTCVVVDVSHEDPEVKFNWYVDGVEVHNAKTKPREEQYNSTYRVVSVLTVLHQDWLNGKEYKCKVSNKALPAPIEKTISKAKGQPREPQVYVYPPSREEMTKNQVSLTCLVKGFYPSDIAVEWESNGQPENNYKTTPPVLDEDGSFALVSKLTVDKSRWQQGNVFSCSVMHEALHNHYTQKSLSLSPGK

SEQ ID NO: 123 - protein, 979 aa, Artificial Sequence
  Synthetic Construct
EVQLQQSGPELVKPGASVKMSCKASGYTFTDYYMKWVKQSHGKSLEWIGHINPNNDDTFYTQKFKGRATLTVDKSSSTAYMQLNSLTSEDSAVYYCVRDDYDGGWFAYWGQGTLVTVSSASTKGPSVFPLAPSSKSTSGGTAALGCLVKDYFPEPVTVSWNSGALTSGVHTFPAVLQSSGLYSLSSVVTVPSSSLGTQTYICNVNHKPSNTKVDKKVEPKSCDKPGSGIWELKKDVYVVELDWYPDAPGEMVVLTCDTPEEDGITWTLDQSSEVLGSGKTLTIQVKAAGDAGQYTCHKGGEVLSHSLLLLHKKEDGIWSTDILKDQKEPKNKTFLRCEAKNYSGRFTCWWLTTISTDLTFSVKSSRGSSDPQGVTCGAATLSAERVRGDNKEYEYSVECQEDSACPAAEESLPIEVMVDAVHKLKYENYTSSFFIRDIIKPDPPKNLQLKPLKNSRQVEVSWEYPDTWSTPHSYFSLTFCVQVQGKSKREKKDRVFTDKTSATVICRKNASISVRAQDRYYSSSWSEWASVPCSGGGGSGGGGSGGGGSGGGGSGRNLPVATPDPGMFPCLHHSQNLLRAVSNMLQKARQTLEFYPCTSEEIDHEDITKDKTSTVEACLPLELTKNESCLNSRETSFITNGSCLASRKTSFMMALCLSSIYEDLKMYQVEFKTMNAKLLMDPKRQIFLDQNMLAVIDELMQALNFNSETVPQKSSLEEPDFYKTKIKLCILLHAFRIRAVTIDRVMSYLNASDKTHTCPPCPAPEDEGGPSVFLFPPKPKDTLMISRTPEVTCVVVDVSHEDPEVKFNWYVDGVEVHNAKTKPREEQYNSTYRVVSVLTVLHQDWLNGKEYKCKVSNKALPAPIEKTISKAKGQPREPQVYVYPPSREEMTKNQVSLTCLVKGFYPSDIAVEWESNGQPENNYKTTPPVLDEDGSFALVSKLTVDKSRWQQGNVFSCSVMHEALHNHYTQKSLSLSPGK

SEQ ID NO: 124 - protein, 952 aa, Artificial Sequence
  Synthetic Construct
EVQLQQSGPELVKPGASVKMSCKASGYTFTDYYMKWVKQSHGKSLEWIGHINPNNDDTFYTQKFKGRATLTVDKSSSTAYMQLNSLTSEDSAVYYCVRDDYDGGWFAYWGQGTLVTVSSASTKGPSVFPLAPSSKSTSGGTAALGCLVKDYFPEPVTVSWNSGALTSGVHTFPAVLQSSGLYSLSSVVTVPSSSLGTQTYICNVNHKPSNTKVDKKVEPKSCDKPGSGIWELKKDVYVVELDWYPDAPGEMVVLTCDTPEEDGITWTLDQSSEVLGSGKTLTIQVKAAGDAGQYTCHKGGEVLSHSLLLLHKKEDGIWSTDILKDQKEPKNKTFLRCEAKNYSGRFTCWWLTTISTDLTFSVKSSRGSSDPQGVTCGAATLSAERVRGDNKEYEYSVECQEDSACPAAEESLPIEVMVDAVHKLKYENYTSSFFIRDIIKPDPPKNLQLKPLKNSRQVEVSWEYPDTWSTPHSYFSLTFCVQVQGKSKREKKDRVFTDKTSATVICRKNASISVRAQDRYYSSSWSEWASVPCSGGGGSGGGGSGGGGSGGGGSGRAVPGGSSPAWTQCQQLSQKLCTLAWSAHPLVGHMDLREEGDEETTNDVPHIQCGDGCDPQGLRDNSQFCLQRIHQGLIFYEKLLGSDIFTGEPSLLPDSPVGQLHASLLGLSQLLQPEGHHWETQQIPSLSPSQPWQRLLLRFKILRSLQAFVAVAARVFAHGAATLSPDKTHTCPPCPAPEDEGGPSVFLFPPKPKDTLMISRTPEVTCVVVDVSHEDPEVKFNWYVDGVEVHNAKTKPREEQYNSTYRVVSVLTVLHQDWLNGKEYKCKVSNKALPAPIEKTISKAKGQPREPQVYVYPPSREEMTKNQVSLTCLVKGFYPSDIAVEWESNGQPENNYKTTPPVLDEDGSFALVSKLTVDKSRWQQGNVFSCSVMHEALHNHYTQKSLSLSPGK

SEQ ID NO: 125 - protein, 120 aa, Artificial Sequence
  Synthetic Construct
QVQLVESGGGVVQPGRSLRLSCAASGFTFSSYTMHWVRQAPGKGLEWVTFISYDGNNKYYADSVKGRFTISRDNSKNTLYLQMNSLRAEDTAIYYCARTGWLGPFDYWGQGTLVTVSSAS

SEQ ID NO: 126 - protein, 107 aa, Artificial Sequence
  Synthetic Construct
EIVLTQSPGTLSLSPGERATLSCRASQSVGSSYLAWYQQKPGQAPRLLIYGAFSRATGIPDRFSGSGSGTDFTLTISRLEPEDFAVYYCQQYGSSPWTFGQGTKVEI

SEQ ID NO: 127 - protein, 448 aa, Artificial Sequence
  Synthetic Construct
QVQLVESGGGVVQPGRSLRLSCAASGFTFSSYTMHWVRQAPGKGLEWVTFISYDGNNKYYADSVKGRFTISRDNSKNTLYLQMNSLRAEDTAIYYCARTGWLGPFDYWGQGTLVTVSSASTKGPSVFPLAPSSKSTSGGTAALGCLVKDYFPEPVTVSWNSGALTSGVHTFPAVLQSSGLYSLSSVVTVPSSSLGTQTYICNVNHKPSNTKVDKKVEPKSCDKTHTCPPCPAPELLGGPSVFLFPPKPKDTLMISRTPEVTCVVVDVSHEDPEVKFNWYVDGVEVHNAKTKPREEQYASTYRVVSVLTVLHQDWLNGKEYKCKVSNKALPAPIEKTISKAKGQPREPQVYTLPPSRDELTKNQVSLTCLVKGFYPSDIAVEWESNGQPENNYKTTPPVLDSDGSFFLYSKLTVDKSRWQQGNVFSCSVMHEALHNHYTQKSLSLSPGK

SEQ ID NO: 128 - protein, 448 aa, Artificial Sequence
  Synthetic Construct
QVQLVESGGGVVQPGRSLRLSCAASGFTFSSYTMHWVRQAPGKGLEWVTFISYDGNNKYYADSVKGRFTISRDNSKNTLYLQMNSLRAEDTAIYYCARTGWLGPFDYWGQGTLVTVSSASTKGPSVFPLAPSSKSTSGGTAALGCLVKDYFPEPVTVSWNSGALTSGVHTFPAVLQSSGLYSLSSVVTVPSSSLGTQTYICNVNHKPSNTKVDKRVEPKSCDKTHTCPPCPAPELLGGPSVFLFPPKPKDTLMISRTPEVTCVVVDVSHEDPEVKFNWYVDGVEVHNAKTKPREEQYNSTYRVVSVLTVLHQDWLNGKEYKCKVSNKALPAPIEKTISKAKGQPREPQVYTLPPSRDELTKNQVSLTCLVKGFYPSDIAVEWESNGQPENNYKTTPPVLDSDGSFFLYSKLTVDKSRWQQGNVFSCSVMHEALHNHYTQKSLSLSPGK

SEQ ID NO: 129 - protein, 215 aa, Artificial Sequence
  Synthetic Construct
EIVLTQSPGTLSLSPGERATLSCRASQSVGSSYLAWYQQKPGQAPRLLIYGAFSRATGIPDRFSGSGSGTDFTLTISRLEPEDFAVYYCQQYGSSPWTFGQGTKVEIKRTVAAPSVFIFPPSDEQLKSGTASVVCLLNNFYPREAKVQWKVDNALQSGNSQESVTEQDSKDSTYSLSSTLTLSKADYEKHKVYACEVTHQGLSSPVTKSFNRGEC

SEQ ID NO: 130 - protein, 448 aa, Artificial Sequence
  Synthetic Construct
QVQLVESGGGVVQPGRSLRLSCAASGFTFSSYTMHWVRQAPGKGLEWVTFISYDGNNKYYADSVKGRFTISRDNSKNTLYLQMNSLRAEDTAIYYCARTGWLGPFDYWGQGTLVTVSSASTKGPSVFPLAPSSKSTSGGTAALGCLVKDYFPEPVTVSWNSGALTSGVHTFPAVLQSSGLYSLSSVVTVPSSSLGTQTYICNVNHKPSNTKVDKKVEPKSCDKTHTCPPCPAPEKKGGPSVFLFPPKPKDTLMISRTPEVTCVVVDVSHEDPEVKFNWYVDGVEVHNAKTKPREEQYNSTYRVVSVLTVLHQDWLNGKEYKCKVSNKALPAPIEKTISKAKGQPREPQVYVLPPSREEMTKNQVSLLCLVKGFYPSDIAVEWESNGQPENRYMTWPPVLDSDGSFFLYSKLTVDKSRWQQGNVFSCSVMHEALHNHYTQKSLSLSPGK

SEQ ID NO: 131 - protein, 584 aa, Artificial Sequence
  Synthetic Construct
QVQLVESGGGVVQPGRSLRLSCAASGFTFSSYTMHWVRQAPGKGLEWVTFISYDGNNKYYADSVKGRFTISRDNSKNTLYLQMNSLRAEDTAIYYCARTGWLGPFDYWGQGTLVTVSSASTKGPSVFPLAPSSKSTSGGTAALGCLVKDYFPEPVTVSWNSGALTSGVHTFPAVLQSSGLYSLSSVVTVPSSSLGTQTYICNVNHKPSNTKVDKKVEPKSCDKPAPTSSSTKKTQLQLEHLLLDLQMILNGINNYKNPKLTDMLTFEFYMPKKATELKHLQCLERELKPLEEVLNLAQSKNFHLRPRDLISNINVIVLELKGSETTFMCEYADETATIVEFLNRWITFCQSIISTLTDKTHTCPPCPAPEDEGGPSVFLFPPKPKDTLMISRTPEVTCVVVDVSHEDPEVKFNWYVDGVEVHNAKTKPREEQYNSTYRVVSVLTVLHQDWLNGKEYKCKVSNKALPAPIEKTISKAKGQPREPQVYVYPPSREEMTKNQVSLTCLVKGFYPSDIAVEWESNGQPENNYKTTPPVLDEDGSFALVSKLTVDKSRWQQGNVFSCSVMHEALHNHYTQKSLSLSPGK

SEQ ID NO: 132 - protein, 623 aa, Artificial Sequence
  Synthetic Construct
QVQLVESGGGVVQPGRSLRLSCAASGFTFSSYTMHWVRQAPGKGLEWVTFISYDGNNKYYADSVKGRFTISRDNSKNTLYLQMNSLRAEDTAIYYCARTGWLGPFDYWGQGTLVTVSSASTKGPSVFPLAPSSKSTSGGTAALGCLVKDYFPEPVTVSWNSGALTSGVHTFPAVLQSSGLYSLSSVVTVPSSSLGTQTYICNVNHKPSNTKVDKKVEPKSCDKPGSGGGGGCDLPQTHSLGSRRTLMLLAQMRKISLFSCAKDRHDFGFPQEEFGNQFQKAETIPVLHEMIQQIFNLFSTKDSSAAWDETLLDKFYTELYQQLNDLEACVIQGVGVTETPLMKEDSILAVRKYFQRITLYLKEKKYSPCAWEVVRAEIMRSFSLSTNLQESLRSKEDKTHTCPPCPAPEDEGGPSVFLFPPKPKDTLMISRTPEVTCVVVDVSHEDPEVKFNWYVDGVEVHNAKTKPREEQYNSTYRVVSVLTVLHQDWLNGKEYKCKVSNKALPAPIEKTISKAKGQPREPQVYVYPPSREEMTKNQVSLTCLVKGFYPSDIAVEWESNGQPENNYKTTPPVLDEDGSFALVSKLTVDKSRWQQGNVFSCSVMHEALHNHYTQKSLSLSPGK

SEQ ID NO: 133 - protein, 751 aa, Artificial Sequence
  Synthetic Construct
QVQLVESGGGVVQPGRSLRLSCAASGFTFSSYTMHWVRQAPGKGLEWVTFISYDGNNKYYADSVKGRFTISRDNSKNTLYLQMNSLRAEDTAIYYCARTGWLGPFDYWGQGTLVTVSSASTKGPSVFPLAPSSKSTSGGTAALGCLVKDYFPEPVTVSWNSGALTSGVHTFPAVLQSSGLYSLSSVVTVPSSSLGTQTYICNVNHKPSNTKVDKKVEPKSCDKPGSGQDPYVKEAENLKKYFNAGHSDVVDNGTLFLGILKNWKEESDRKIMQSQIVSFYFKLFKNFKDDQSIQKSVETIKEDMNVKFFNSNKKKRDDFEKLTNYSVTDLNVQRKAIHELIQVMAELSPAAKTGKRKRSQMLFRGFEGGGSGGGGSGGGGSGGGGSQDPYVKEAENLKKYFNAGHSDVVDNGTLFLGILKNWKEESDRKIMQSQIVSFYFKLFKNFKDDQSIQKSVETIKEDMNVKFFNSNKKKRDDFEKLTNYSVTDLNVQRKAIHELIQVMAELSPAAKTGKRKRSQMLFRGDKTHTCPPCPAPEDEGGPSVFLFPPKPKDTLMISRTPEVTCVVVDVSHEDPEVKFNWYVDGVEVHNAKTKPREEQYNSTYRVVSVLTVLHQDWLNGKEYKCKVSNKALPAPIEKTISKAKGQPREPQVYVYPPSREEMTKNQVSLTCLVKGFYPSDIAVEWESNGQPENNYKTTPPVLDEDGSFALVSKLTVDKSRWQQGNVFSCSVMHEALHNHYTQKSLSLSPGK

SEQ ID NO: 134 - protein, 795 aa, Artificial Sequence
  Synthetic Construct
QVQLVESGGGVVQPGRSLRLSCAASGFTFSSYTMHWVRQAPGKGLEWVTFISYDGNNKYYADSVKGRFTISRDNSKNTLYLQMNSLRAEDTAIYYCARTGWLGPFDYWGQGTLVTVSSASTKGPSVFPLAPSSKSTSGGTAALGCLVKDYFPEPVTVSWNSGALTSGVHTFPAVLQSSGLYSLSSVVTVPSSSLGTQTYICNVNHKPSNTKVDKKVEPKSCDKPGSGSPGQGTQSENSCTHFPGNLPNMLRDLADAFSRVKTFFQMKDQLDNLLLKESLLEDFKGYLGCQALSEMIQFYLEEVMPQAENQDPDIKAHVNSLGENLKTLRLRLRRCHRFLPCENKSKAVEQVKNAFNKLQEKGIYKAMSEFDIFINYIEAYMTMKIRNFEGGGSGGGGSGGGGSGGGGSSPGQGTQSENSCTHFPGNLPNMLRDLADAFSRVKTFFQMKDQLDNLLLKESLLEDFKGYLGCQALSEMIQFYLEEVMPQAENQDPDIKAHVNSLGENLKTLRLRLRRCHRFLPCENKSKAVEQVKNAFNKLQEKGIYKAMSEFDIFINYIEAYMTMKIRNDKTHTCPPCPAPEDEGGPSVFLFPPKPKDTLMISRTPEVTCVVVDVSHEDPEVKFNWYVDGVEVHNAKTKPREEQYNSTYRVVSVLTVLHQDWLNGKEYKCKVSNKALPAPIEKTISKAKGQPREPQVYVYPPSREEMTKNQVSLTCLVKGFYPSDIAVEWESNGQPENNYKTTPPVLDEDGSFALVSKLTVDKSRWQQGNVFSCSVMHEALHNHYTQKSLSLSPGK

SEQ ID NO: 135 - protein, 978 aa, Artificial Sequence
  Synthetic Construct
QVQLVESGGGVVQPGRSLRLSCAASGFTFSSYTMHWVRQAPGKGLEWVTFISYDGNNKYYADSVKGRFTISRDNSKNTLYLQMNSLRAEDTAIYYCARTGWLGPFDYWGQGTLVTVSSASTKGPSVFPLAPSSKSTSGGTAALGCLVKDYFPEPVTVSWNSGALTSGVHTFPAVLQSSGLYSLSSVVTVPSSSLGTQTYICNVNHKPSNTKVDKKVEPKSCDKPGSGIWELKKDVYVVELDWYPDAPGEMVVLTCDTPEEDGITWTLDQSSEVLGSGKTLTIQVKAAGDAGQYTCHKGGEVLSHSLLLLHKKEDGIWSTDILKDQKEPKNKTFLRCEAKNYSGRFTCWWLTTISTDLTFSVKSSRGSSDPQGVTCGAATLSAERVRGDNKEYEYSVECQEDSACPAAEESLPIEVMVDAVHKLKYENYTSSFFIRDIIKPDPPKNLQLKPLKNSRQVEVSWEYPDTWSTPHSYFSLTFCVQVQGKSKREKKDRVFTDKTSATVICRKNASISVRAQDRYYSSSWSEWASVPCSGGGGSGGGGSGGGGSGGGGSGRNLPVATPDPGMFPCLHHSQNLLRAVSNMLQKARQTLEFYPCTSEEIDHEDITKDKTSTVEACLPLELTKNESCLNSRETSFITNGSCLASRKTSFMMALCLSSIYEDLKMYQVEFKTMNAKLLMDPKRQIFLDQNMLAVIDELMQALNFNSETVPQKSSLEEPDFYKTKIKLCILLHAFRIRAVTIDRVMSYLNASDKTHTCPPCPAPEDEGGPSVFLFPPKPKDTLMISRTPEVTCVVVDVSHEDPEVKFNWYVDGVEVHNAKTKPREEQYNSTYRVVSVLTVLHQDWLNGKEYKCKVSNKALPAPIEKTISKAKGQPREPQVYVYPPSREEMTKNQVSLTCLVKGFYPSDIAVEWESNGQPENNYKTTPPVLDEDGSFALVSKLTVDKSRWQQGNVFSCSVMHEALHNHYTQKSLSLSPGK

SEQ ID NO: 136 - protein, 951 aa, Artificial Sequence
  Synthetic Construct
QVQLVESGGGVVQPGRSLRLSCAASGFTFSSYTMHWVRQAPGKGLEWVTFISYDGNNKYYADSVKGRFTISRDNSKNTLYLQMNSLRAEDTAIYYCARTGWLGPFDYWGQGTLVTVSSASTKGPSVFPLAPSSKSTSGGTAALGCLVKDYFPEPVTVSWNSGALTSGVHTFPAVLQSSGLYSLSSVVTVPSSSLGTQTYICNVNHKPSNTKVDKKVEPKSCDKPGSGIWELKKDVYVVELDWYPDAPGEMVVLTCDTPEEDGITWTLDQSSEVLGSGKTLTIQVKAAGDAGQYTCHKGGEVLSHSLLLLHKKEDGIWSTDILKDQKEPKNKTFLRCEAKNYSGRFTCWWLTTISTDLTFSVKSSRGSSDPQGVTCGAATLSAERVRGDNKEYEYSVECQEDSACPAAEESLPIEVMVDAVHKLKYENYTSSFFIRDIIKPDPPKNLQLKPLKNSRQVEVSWEYPDTWSTPHSYFSLTFCVQVQGKSKREKKDRVFTDKTSATVICRKNASISVRAQDRYYSSSWSEWASVPCSGGGGSGGGGSGGGGSGGGGSGRAVPGGSSPAWTQCQQLSQKLCTLAWSAHPLVGHMDLREEGDEETTNDVPHIQCGDGCDPQGLRDNSQFCLQRIHQGLIFYEKLLGSDIFTGEPSLLPDSPVGQLHASLLGLSQLLQPEGHHWETQQIPSLSPSQPWQRLLLRFKILRSLQAFVAVAARVFAHGAATLSPDKTHTCPPCPAPEDEGGPSVFLFPPKPKDTLMISRTPEVTCVVVDVSHEDPEVKFNWYVDGVEVHNAKTKPREEQYNSTYRVVSVLTVLHQDWLNGKEYKCKVSNKALPAPIEKTISKAKGQPREPQVYVYPPSREEMTKNQVSLTCLVKGFYPSDIAVEWESNGQPENNYKTTPPVLDEDGSFALVSKLTVDKSRWQQGNVFSCSVMHEALHNHYTQKSLSLSPGK

SEQ ID NO: 137 - protein, 120 aa, Artificial Sequence
  Synthetic Construct
EVQLVESGGGLVQPGGSLRLSCAASYFPFSDSWIHWVRQAPGKGLEWVAWISPYGGSSYYADSVQDRFTISADTSKNTAYLQMNSLRAEDTAVYYCAKRHWPGGFDHWGQGTLVTVSSAS

SEQ ID NO: 138 - protein, 106 aa, Artificial Sequence
  Synthetic Construct
DIQMTQSPSSLSASVGDRVTITCSASQDVTTAVAWYQQKPGKAPKLLIYSASFPYRGVPSRFSGSGSGTDFTLTISSLQPEDFATYYCQQYMYHPSTFGQGTKVEI

SEQ ID NO: 139 - protein, 448 aa, Artificial Sequence
  Synthetic Construct
EVQLVESGGGLVQPGGSLRLSCAASYFPFSDSWIHWVRQAPGKGLEWVAWISPYGGSSYYADSVQDRFTISADTSKNTAYLQMNSLRAEDTAVYYCAKRHWPGGFDHWGQGTLVTVSSASTKGPSVFPLAPSSKSTSGGTAALGCLVKDYFPEPVTVSWNSGALTSGVHTFPAVLQSSGLYSLSSVVTVPSSSLGTQTYICNVNHKPSNTKVDKKVEPKSCDKTHTCPPCPAPELLGGPSVFLFPPKPKDTLMISRTPEVTCVVVDVSHEDPEVKFNWYVDGVEVHNAKTKPREEQYASTYRVVSVLTVLHQDWLNGKEYKCKVSNKALPAPIEKTISKAKGQPREPQVYTLPPSRDELTKNQVSLTCLVKGFYPSDIAVEWESNGQPENNYKTTPPVLDSDGSFFLYSKLTVDKSRWQQGNVFSCSVMHEALHNHYTQKSLSLSPGK

SEQ ID NO: 140 - protein, 214 aa, Artificial Sequence
  Synthetic Construct
DIQMTQSPSSLSASVGDRVTITCSASQDVTTAVAWYQQKPGKAPKLLIYSASFPYRGVPSRFSGSGSGTDFTLTISSLQPEDFATYYCQQYMYHPSTFGQGTKVEIKRTVAAPSVFIFPPSDEQLKSGTASVVCLLNNFYPREAKVQWKVDNALQSGNSQESVTEQDSKDSTYSLSSTLTLSKADYEKHKVYACEVTHQGLSSPVTKSFNRGEC

SEQ ID NO: 141 - protein, 448 aa, Artificial Sequence
  Synthetic Construct
EVQLVESGGGLVQPGGSLRLSCAASGFTFSDSWIHWVRQAPGKGLEWVAWISPYGGSTYYADSVKGRFTISADTSKNTAYLQMNSLRAEDTAVYYCARRHWPGGFDYWGQGTLVTVSSASTKGPSVFPLAPSSKSTSGGTAALGCLVKDYFPEPVTVSWNSGALTSGVHTFPAVLQSSGLYSLSSVVTVPSSSLGTQTYICNVNHKPSNTKVDKKVEPKSCDKTHTCPPCPAPELLGGPSVFLFPPKPKDTLMISRTPEVTCVVVDVSHEDPEVKFNWYVDGVEVHNAKTKPREEQYASTYRVVSVLTVLHQDWLNGKEYKCKVSNKALPAPIEKTISKAKGQPREPQVYTLPPSREEMTKNQVSLTCLVKGFYPSDIAVEWESNGQPENNYKTTPPVLDSDGSFFLYSKLTVDKSRWQQGNVFSCSVMHEALHNHYTQKSLSLSPGK

SEQ ID NO: 142 - protein, 214 aa, Artificial Sequence
  Synthetic Construct
DIQMTQSPSSLSASVGDRVTITCRASQDVSTAVAWYQQKPGKAPKLLIYSASFLYSGVPSRFSGSGSGTDFTLTISSLQPEDFATYYCQQYLYHPATFGQGTKVEIKRTVAAPSVFIFPPSDEQLKSGTASVVCLLNNFYPREAKVQWKVDNALQSGNSQESVTEQDSKDSTYSLSSTLTLSKADYEKHKVYACEVTHQGLSSPVTKSFNRGEC

SEQ ID NO: 143 - protein, 448 aa, Artificial Sequence
  Synthetic Construct
EVQLVESGGGLVQPGGSLRLSCAASYFPFSDSWIHWVRQAPGKGLEWVAWISPYGGSSYYADSVQDRFTISADTSKNTAYLQMNSLRAEDTAVYYCAKRHWPGGFDHWGQGTLVTVSSASTKGPSVFPLAPSSKSTSGGTAALGCLVKDYFPEPVTVSWNSGALTSGVHTFPAVLQSSGLYSLSSVVTVPSSSLGTQTYICNVNHKPSNTKVDKKVEPKSCDKTHTCPPCPAPEKKGGPSVFLFPPKPKDTLMISRTPEVTCVVVDVSHEDPEVKFNWYVDGVEVHNAKTKPREEQYNSTYRVVSVLTVLHQDWLNGKEYKCKVSNKALPAPIEKTISKAKGQPREPQVYVLPPSREEMTKNQVSLLCLVKGFYPSDIAVEWESNGQPENRYMTWPPVLDSDGSFFLYSKLTVDKSRWQQGNVFSCSVMHEALHNHYTQKSLSLSPGK

SEQ ID NO: 144 - protein, 584 aa, Artificial Sequence
  Synthetic Construct
EVQLVESGGGLVQPGGSLRLSCAASYFPFSDSWIHWVRQAPGKGLEWVAWISPYGGSSYYADSVQDRFTISADTSKNTAYLQMNSLRAEDTAVYYCAKRHWPGGFDHWGQGTLVTVSSASTKGPSVFPLAPSSKSTSGGTAALGCLVKDYFPEPVTVSWNSGALTSGVHTFPAVLQSSGLYSLSSVVTVPSSSLGTQTYICNVNHKPSNTKVDKKVEPKSCDKPAPTSSSTKKTQLQLEHLLLDLQMILNGINNYKNPKLTDMLTFEFYMPKKATELKHLQCLERELKPLEEVLNLAQSKNFHLRPRDLISNINVIVLELKGSETTFMCEYADETATIVEFLNRWITFCQSIISTLTDKTHTCPPCPAPEDEGGPSVFLFPPKPKDTLMISRTPEVTCVVVDVSHEDPEVKFNWYVDGVEVHNAKTKPREEQYNSTYRVVSVLTVLHQDWLNGKEYKCKVSNKALPAPIEKTISKAKGQPREPQVYVYPPSREEMTKNQVSLTCLVKGFYPSDIAVEWESNGQPENNYKTTPPVLDEDGSFALVSKLTVDKSRWQQGNVFSCSVMHEALHNHYTQKSLSLSPGK

SEQ ID NO: 145 - protein, 623 aa, Artificial Sequence
  Synthetic Construct
EVQLVESGGGLVQPGGSLRLSCAASYFPFSDSWIHWVRQAPGKGLEWVAWISPYGGSSYYADSVQDRFTISADTSKNTAYLQMNSLRAEDTAVYYCAKRHWPGGFDHWGQGTLVTVSSASTKGPSVFPLAPSSKSTSGGTAALGCLVKDYFPEPVTVSWNSGALTSGVHTFPAVLQSSGLYSLSSVVTVPSSSLGTQTYICNVNHKPSNTKVDKKVEPKSCDKPGSGGGGGCDLPQTHSLGSRRTLMLLAQMRKISLFSCAKDRHDFGFPQEEFGNQFQKAETIPVLHEMIQQIFNLFSTKDSSAAWDETLLDKFYTELYQQLNDLEACVIQGVGVTETPLMKEDSILAVRKYFQRITLYLKEKKYSPCAWEVVRAEIMRSFSLSTNLQESLRSKEDKTHTCPPCPAPEDEGGPSVFLFPPKPKDTLMISRTPEVTCVVVDVSHEDPEVKFNWYVDGVEVHNAKTKPREEQYNSTYRVVSVLTVLHQDWLNGKEYKCKVSNKALPAPIEKTISKAKGQPREPQVYVYPPSREEMTKNQVSLTCLVKGFYPSDIAVEWESNGQPENNYKTTPPVLDEDGSFALVSKLTVDKSRWQQGNVFSCSVMHEALHNHYTQKSLSLSPGK

SEQ ID NO: 146 - protein, 751 aa, Artificial Sequence
  Synthetic Construct
EVQLVESGGGLVQPGGSLRLSCAASYFPFSDSWIHWVRQAPGKGLEWVAWISPYGGSSYYADSVQDRFTISADTSKNTAYLQMNSLRAEDTAVYYCAKRHWPGGFDHWGQGTLVTVSSASTKGPSVFPLAPSSKSTSGGTAALGCLVKDYFPEPVTVSWNSGALTSGVHTFPAVLQSSGLYSLSSVVTVPSSSLGTQTYICNVNHKPSNTKVDKKVEPKSCDKPGSGQDPYVKEAENLKKYFNAGHSDVVDNGTLFLGILKNWKEESDRKIMQSQIVSFYFKLFKNFKDDQSIQKSVETIKEDMNVKFFNSNKKKRDDFEKLTNYSVTDLNVQRKAIHELIQVMAELSPAAKTGKRKRSQMLFRGFEGGGSGGGGSGGGGSGGGGSQDPYVKEAENLKKYFNAGHSDVVDNGTLFLGILKNWKEESDRKIMQSQIVSFYFKLFKNFKDDQSIQKSVETIKEDMNVKFFNSNKKKRDDFEKLTNYSVTDLNVQRKAIHELIQVMAELSPAAKTGKRKRSQMLFRGDKTHTCPPCPAPEDEGGPSVFLFPPKPKDTLMISRTPEVTCVVVDVSHEDPEVKFNWYVDGVEVHNAKTKPREEQYNSTYRVVSVLTVLHQDWLNGKEYKCKVSNKALPAPIEKTISKAKGQPREPQVYVYPPSREEMTKNQVSLTCLVKGFYPSDIAVEWESNGQPENNYKTTPPVLDEDGSFALVSKLTVDKSRWQQGNVFSCSVMHEALHNHYTQKSLSLSPGK

SEQ ID NO: 147 - protein, 795 aa, Artificial Sequence
  Synthetic Construct
EVQLVESGGGLVQPGGSLRLSCAASYFPFSDSWIHWVRQAPGKGLEWVAWISPYGGSSYYADSVQDRFTISADTSKNTAYLQMNSLRAEDTAVYYCAKRHWPGGFDHWGQGTLVTVSSASTKGPSVFPLAPSSKSTSGGTAALGCLVKDYFPEPVTVSWNSGALTSGVHTFPAVLQSSGLYSLSSVVTVPSSSLGTQTYICNVNHKPSNTKVDKKVEPKSCDKPGSGSPGQGTQSENSCTHFPGNLPNMLRDLADAFSRVKTFFQMKDQLDNLLLKESLLEDFKGYLGCQALSEMIQFYLEEVMPQAENQDPDIKAHVNSLGENLKTLRLRLRRCHRFLPCENKSKAVEQVKNAFNKLQEKGIYKAMSEFDIFINYIEAYMTMKIRNFEGGGSGGGGSGGGGSGGGGSSPGQGTQSENSCTHFPGNLPNMLRDLADAFSRVKTFFQMKDQLDNLLLKESLLEDFKGYLGCQALSEMIQFYLEEVMPQAENQDPDIKAHVNSLGENLKTLRLRLRRCHRFLPCENKSKAVEQVKNAFNKLQEKGIYKAMSEFDIFINYIEAYMTMKIRNDKTHTCPPCPAPEDEGGPSVFLFPPKPKDTLMISRTPEVTCVVVDVSHEDPEVKFNWYVDGVEVHNAKTKPREEQYNSTYRVVSVLTVLHQDWLNGKEYKCKVSNKALPAPIEKTISKAKGQPREPQVYVYPPSREEMTKNQVSLTCLVKGFYPSDIAVEWESNGQPENNYKTTPPVLDEDGSFALVSKLTVDKSRWQQGNVFSCSVMHEALHNHYTQKSLSLSPGK

SEQ ID NO: 148 - protein, 978 aa, Artificial Sequence
  Synthetic Construct
EVQLVESGGGLVQPGGSLRLSCAASYFPFSDSWIHWVRQAPGKGLEWVAWISPYGGSSYYADSVQDRFTISADTSKNTAYLQMNSLRAEDTAVYYCAKRHWPGGFDHWGQGTLVTVSSASTKGPSVFPLAPSSKSTSGGTAALGCLVKDYFPEPVTVSWNSGALTSGVHTFPAVLQSSGLYSLSSVVTVPSSSLGTQTYICNVNHKPSNTKVDKKVEPKSCDKPGSGIWELKKDVYVVELDWYPDAPGEMVVLTCDTPEEDGITWTLDQSSEVLGSGKTLTIQVKAAGDAGQYTCHKGGEVLSHSLLLLHKKEDGIWSTDILKDQKEPKNKTFLRCEAKNYSGRFTCWWLTTISTDLTFSVKSSRGSSDPQGVTCGAATLSAERVRGDNKEYEYSVECQEDSACPAAEESLPIEVMVDAVHKLKYENYTSSFFIRDIIKPDPPKNLQLKPLKNSRQVEVSWEYPDTWSTPHSYFSLTFCVQVQGKSKREKKDRVFTDKTSATVICRKNASISVRAQDRYYSSSWSEWASVPCSGGGGSGGGGSGGGGSGGGGSGRNLPVATPDPGMFPCLHHSQNLLRAVSNMLQKARQTLEFYPCTSEEIDHEDITKDKTSTVEACLPLELTKNESCLNSRETSFITNGSCLASRKTSFMMALCLSSIYEDLKMYQVEFKTMNAKLLMDPKRQIFLDQNMLAVIDELMQALNFNSETVPQKSSLEEPDFYKTKIKLCILLHAFRIRAVTIDRVMSYLNASDKTHTCPPCPAPEDEGGPSVFLFPPKPKDTLMISRTPEVTCVVVDVSHEDPEVKFNWYVDGVEVHNAKTKPREEQYNSTYRVVSVLTVLHQDWLNGKEYKCKVSNKALPAPIEKTISKAKGQPREPQVYVYPPSREEMTKNQVSLTCLVKGFYPSDIAVEWESNGQPENNYKTTPPVLDEDGSFALVSKLTVDKSRWQQGNVFSCSVMHEALHNHYTQKSLSLSPGK

SEQ ID NO: 149 - protein, 951 aa, Artificial Sequence
  Synthetic Construct
EVQLVESGGGLVQPGGSLRLSCAASYFPFSDSWIHWVRQAPGKGLEWVAWISPYGGSSYYADSVQDRFTISADTSKNTAYLQMNSLRAEDTAVYYCAKRHWPGGFDHWGQGTLVTVSSASTKGPSVFPLAPSSKSTSGGTAALGCLVKDYFPEPVTVSWNSGALTSGVHTFPAVLQSSGLYSLSSVVTVPSSSLGTQTYICNVNHKPSNTKVDKKVEPKSCDKPGSGIWELKKDVYVVELDWYPDAPGEMVVLTCDTPEEDGITWTLDQSSEVLGSGKTLTIQVKAAGDAGQYTCHKGGEVLSHSLLLLHKKEDGIWSTDILKDQKEPKNKTFLRCEAKNYSGRFTCWWLTTISTDLTFSVKSSRGSSDPQGVTCGAATLSAERVRGDNKEYEYSVECQEDSACPAAEESLPIEVMVDAVHKLKYENYTSSFFIRDIIKPDPPKNLQLKPLKNSRQVEVSWEYPDTWSTPHSYFSLTFCVQVQGKSKREKKDRVFTDKTSATVICRKNASISVRAQDRYYSSSWSEWASVPCSGGGGSGGGGSGGGGSGGGGSGRAVPGGSSPAWTQCQQLSQKLCTLAWSAHPLVGHMDLREEGDEETTNDVPHIQCGDGCDPQGLRDNSQFCLQRIHQGLIFYEKLLGSDIFTGEPSLLPDSPVGQLHASLLGLSQLLQPEGHHWETQQIPSLSPSQPWQRLLLRFKILRSLQAFVAVAARVFAHGAATLSPDKTHTCPPCPAPEDEGGPSVFLFPPKPKDTLMISRTPEVTCVVVDVSHEDPEVKFNWYVDGVEVHNAKTKPREEQYNSTYRVVSVLTVLHQDWLNGKEYKCKVSNKALPAPIEKTISKAKGQPREPQVYVYPPSREEMTKNQVSLTCLVKGFYPSDIAVEWESNGQPENNYKTTPPVLDEDGSFALVSKLTVDKSRWQQGNVFSCSVMHEALHNHYTQKSLSLSPGK

SEQ ID NO: 150 - protein, 122 aa, Artificial Sequence
  Synthetic Construct
EVQLVESGGGLVQPGGSLRLSCAASGFNIKDTYIHWVRQAPGKGLEWVARIYPTNGYTRYADSVKGRFTISADTSKNTAYLQMNSLRAEDTAVYYCSRWGGDGFYAMDYWGQGTLVTVSSAS

SEQ ID NO: 151 - protein, 106 aa, Artificial Sequence
  Synthetic Construct
DIQMTQSPSSLSASVGDRVTITCRASQDVNTAVAWYQQKPGKAPKLLIYSASFLYSGVPSRFSGSRSGTDFTLTISSLQPEDFATYYCQQHYTTPPTFGQGTKVEI

SEQ ID NO: 152 - protein, 450 aa, Artificial Sequence
  Synthetic Construct
EVQLVESGGGLVQPGGSLRLSCAASGFNIKDTYIHWVRQAPGKGLEWVARIYPTNGYTRYADSVKGRFTISADTSKNTAYLQMNSLRAEDTAVYYCSRWGGDGFYAMDYWGQGTLVTVSSASTKGPSVFPLAPSSKSTSGGTAALGCLVKDYFPEPVTVSWNSGALTSGVHTFPAVLQSSGLYSLSSVVTVPSSSLGTQTYICNVNHKPSNTKVDKKVEPKSCDKTHTCPPCPAPELLGGPSVFLFPPKPKDTLMISRTPEVTCVVVDVSHEDPEVKFNWYVDGVEVHNAKTKPREEQYASTYRVVSVLTVLHQDWLNGKEYKCKVSNKALPAPIEKTISKAKGQPREPQVYTLPPSRDELTKNQVSLTCLVKGFYPSDIAVEWESNGQPENNYKTTPPVLDSDGSFFLYSKLTVDKSRWQQGNVFSCSVMHEALHNHYTQKSLSLSPGK

SEQ ID NO: 153 - protein, 450 aa, Artificial Sequence
  Synthetic Construct
EVQLVESGGGLVQPGGSLRLSCAASGFNIKDTYIHWVRQAPGKGLEWVARIYPTNGYTRYADSVKGRFTISADTSKNTAYLQMNSLRAEDTAVYYCSRWGGDGFYAMDYWGQGTLVTVSSASTKGPSVFPLAPSSKSTSGGTAALGCLVKDYFPEPVTVSWNSGALTSGVHTFPAVLQSSGLYSLSSVVTVPSSSLGTQTYICNVNHKPSNTKVDKKVEPKSCDKTHTCPPCPAPELLGGPSVFLFPPKPKDTLMISRTPEVTCVVVDVSHEDPEVKFNWYVDGVEVHNAKTKPREEQYNSTYRVVSVLTVLHQDWLNGKEYKCKVSNKALPAPIEKTISKAKGQPREPQVYTLPPSREEMTKNQVSLTCLVKGFYPSDIAVEWESNGQPENNYKTTPPVLDSDGSFFLYSKLTVDKSRWQQGNVFSCSVMHEALHNHYTQKSLSLSPGK

SEQ ID NO: 154 - protein, 214 aa, Artificial Sequence
  Synthetic Construct
DIQMTQSPSSLSASVGDRVTITCRASQDVNTAVAWYQQKPGKAPKLLIYSASFLYSGVPSRFSGSRSGTDFTLTISSLQPEDFATYYCQQHYTTPPTFGQGTKVEIKRTVAAPSVFIFPPSDEQLKSGTASVVCLLNNFYPREAKVQWKVDNALQSGNSQESVTEQDSKDSTYSLSSTLTLSKADYEKHKVYACEVTHQGLSSPVTKSFNRGEC

SEQ ID NO: 155 - protein, 450 aa, Artificial Sequence
  Synthetic Construct
EVQLVESGGGLVQPGGSLRLSCAASGFNIKDTYIHWVRQAPGKGLEWVARIYPTNGYTRYADSVKGRFTISADTSKNTAYLQMNSLRAEDTAVYYCSRWGGDGFYAMDYWGQGTLVTVSSASTKGPSVFPLAPSSKSTSGGTAALGCLVKDYFPEPVTVSWNSGALTSGVHTFPAVLQSSGLYSLSSVVTVPSSSLGTQTYICNVNHKPSNTKVDKKVEPKSCDKTHTCPPCPAPEKKGGPSVFLFPPKPKDTLMISRTPEVTCVVVDVSHEDPEVKFNWYVDGVEVHNAKTKPREEQYNSTYRVVSVLTVLHQDWLNGKEYKCKVSNKALPAPIEKTISKAKGQPREPQVYVLPPSREEMTKNQVSLLCLVKGFYPSDIAVEWESNGQPENRYMTWPPVLDSDGSFFLYSKLTVDKSRWQQGNVFSCSVMHEALHNHYTQKSLSLSPGK

SEQ ID NO: 156 - protein, 586 aa, Artificial Sequence
  Synthetic Construct
EVQLVESGGGLVQPGGSLRLSCAASGFNIKDTYIHWVRQAPGKGLEWVARIYPTNGYTRYADSVKGRFTISADTSKNTAYLQMNSLRAEDTAVYYCSRWGGDGFYAMDYWGQGTLVTVSSASTKGPSVFPLAPSSKSTSGGTAALGCLVKDYFPEPVTVSWNSGALTSGVHTFPAVLQSSGLYSLSSVVTVPSSSLGTQTYICNVNHKPSNTKVDKKVEPKSCDKPAPTSSSTKKTQLQLEHLLLDLQMILNGINNYKNPKLTDMLTFEFYMPKKATELKHLQCLERELKPLEEVLNLAQSKNFHLRPRDLISNINVIVLELKGSETTFMCEYADETATIVEFLNRWITFCQSIISTLTDKTHTCPPCPAPEDEGGPSVFLFPPKPKDTLMISRTPEVTCVVVDVSHEDPEVKFNWYVDGVEVHNAKTKPREEQYNSTYRVVSVLTVLHQDWLNGKEYKCKVSNKALPAPIEKTISKAKGQPREPQVYVYPPSREEMTKNQVSLTCLVKGFYPSDIAVEWESNGQPENNYKTTPPVLDEDGSFALVSKLTVDKSRWQQGNVFSCSVMHEALHNHYTQKSLSLSPGK

SEQ ID NO: 157 - protein, 625 aa, Artificial Sequence
  Synthetic Construct
EVQLVESGGGLVQPGGSLRLSCAASGFNIKDTYIHWVRQAPGKGLEWVARIYPTNGYTRYADSVKGRFTISADTSKNTAYLQMNSLRAEDTAVYYCSRWGGDGFYAMDYWGQGTLVTVSSASTKGPSVFPLAPSSKSTSGGTAALGCLVKDYFPEPVTVSWNSGALTSGVHTFPAVLQSSGLYSLSSVVTVPSSSLGTQTYICNVNHKPSNTKVDKKVEPKSCDKPGSGGGGGCDLPQTHSLGSRRTLMLLAQMRKISLFSCAKDRHDFGFPQEEFGNQFQKAETIPVLHEMIQQIFNLFSTKDSSAAWDETLLDKFYTELYQQLNDLEACVIQGVGVTETPLMKEDSILAVRKYFQRITLYLKEKKYSPCAWEVVRAEIMRSFSLSTNLQESLRSKEDKTHTCPPCPAPEDEGGPSVFLFPPKPKDTLMISRTPEVTCVVVDVSHEDPEVKFNWYVDGVEVHNAKTKPREEQYNSTYRVVSVLTVLHQDWLNGKEYKCKVSNKALPAPIEKTISKAKGQPREPQVYVYPPSREEMTKNQVSLTCLVKGFYPSDIAVEWESNGQPENNYKTTPPVLDEDGSFALVSKLTVDKSRWQQGNVFSCSVMHEALHNHYTQKSLSLSPGK

SEQ ID NO: 158 - protein, 753 aa, Artificial Sequence
  Synthetic Construct
EVQLVESGGGLVQPGGSLRLSCAASGFNIKDTYIHWVRQAPGKGLEWVARIYPTNGYTRYADSVKGRFTISADTSKNTAYLQMNSLRAEDTAVYYCSRWGGDGFYAMDYWGQGTLVTVSSASTKGPSVFPLAPSSKSTSGGTAALGCLVKDYFPEPVTVSWNSGALTSGVHTFPAVLQSSGLYSLSSVVTVPSSSLGTQTYICNVNHKPSNTKVDKKVEPKSCDKPGSGQDPYVKEAENLKKYFNAGHSDVVDNGTLFLGILKNWKEESDRKIMQSQIVSFYFKLFKNFKDDQSIQKSVETIKEDMNVKFFNSNKKKRDDFEKLTNYSVTDLNVQRKAIHELIQVMAELSPAAKTGKRKRSQMLFRGFEGGGSGGGGSGGGGSGGGGSQDPYVKEAENLKKYFNAGHSDVVDNGTLFLGILKNWKEESDRKIMQSQIVSFYFKLFKNFKDDQSIQKSVETIKEDMNVKFFNSNKKKRDDFEKLTNYSVTDLNVQRKAIHELIQVMAELSPAAKTGKRKRSQMLFRGDKTHTCPPCPAPEDEGGPSVFLFPPKPKDTLMISRTPEVTCVVVDVSHEDPEVKFNWYVDGVEVHNAKTKPREEQYNSTYRVVSVLTVLHQDWLNGKEYKCKVSNKALPAPIEKTISKAKGQPREPQVYVYPPSREEMTKNQVSLTCLVKGFYPSDIAVEWESNGQPENNYKTTPPVLDEDGSFALVSKLTVDKSRWQQGNVFSCSVMHEALHNHYTQKSLSLSPGK

SEQ ID NO: 159 - protein, 797 aa, Artificial Sequence
  Synthetic Construct
EVQLVESGGGLVQPGGSLRLSCAASGFNIKDTYIHWVRQAPGKGLEWVARIYPTNGYTRYADSVKGRFTISADTSKNTAYLQMNSLRAEDTAVYYCSRWGGDGFYAMDYWGQGTLVTVSSASTKGPSVFPLAPSSKSTSGGTAALGCLVKDYFPEPVTVSWNSGALTSGVHTFPAVLQSSGLYSLSSVVTVPSSSLGTQTYICNVNHKPSNTKVDKKVEPKSCDKPGSGSPGQGTQSENSCTHFPGNLPNMLRDLADAFSRVKTFFQMKDQLDNLLLKESLLEDFKGYLGCQALSEMIQFYLEEVMPQAENQDPDIKAHVNSLGENLKTLRLRLRRCHRFLPCENKSKAVEQVKNAFNKLQEKGIYKAMSEFDIFINYIEAYMTMKIRNFEGGGSGGGGSGGGGSGGGGSSPGQGTQSENSCTHFPGNLPNMLRDLADAFSRVKTFFQMKDQLDNLLLKESLLEDFKGYLGCQALSEMIQFYLEEVMPQAENQDPDIKAHVNSLGENLKTLRLRLRRCHRFLPCENKSKAVEQVKNAFNKLQEKGIYKAMSEFDIFINYIEAYMTMKIRNDKTHTCPPCPAPEDEGGPSVFLFPPKPKDTLMISRTPEVTCVVVDVSHEDPEVKFNWYVDGVEVHNAKTKPREEQYNSTYRVVSVLTVLHQDWLNGKEYKCKVSNKALPAPIEKTISKAKGQPREPQVYVYPPSREEMTKNQVSLTCLVKGFYPSDIAVEWESNGQPENNYKTTPPVLDEDGSFALVSKLTVDKSRWQQGNVFSCSVMHEALHNHYTQKSLSLSPGK

SEQ ID NO: 160 - protein, 980 aa, Artificial Sequence
  Synthetic Construct
EVQLVESGGGLVQPGGSLRLSCAASGFNIKDTYIHWVRQAPGKGLEWVARIYPTNGYTRYADSVKGRFTISADTSKNTAYLQMNSLRAEDTAVYYCSRWGGDGFYAMDYWGQGTLVTVSSASTKGPSVFPLAPSSKSTSGGTAALGCLVKDYFPEPVTVSWNSGALTSGVHTFPAVLQSSGLYSLSSVVTVPSSSLGTQTYICNVNHKPSNTKVDKKVEPKSCDKPGSGIWELKKDVYVVELDWYPDAPGEMVVLTCDTPEEDGITWTLDQSSEVLGSGKTLTIQVKAAGDAGQYTCHKGGEVLSHSLLLLHKKEDGIWSTDILKDQKEPKNKTFLRCEAKNYSGRFTCWWLTTISTDLTFSVKSSRGSSDPQGVTCGAATLSAERVRGDNKEYEYSVECQEDSACPAAEESLPIEVMVDAVHKLKYENYTSSFFIRDIIKPDPPKNLQLKPLKNSRQVEVSWEYPDTWSTPHSYFSLTFCVQVQGKSKREKKDRVFTDKTSATVICRKNASISVRAQDRYYSSSWSEWASVPCSGGGGSGGGGSGGGGSGGGGSGRNLPVATPDPGMFPCLHHSQNLLRAVSNMLQKARQTLEFYPCTSEEIDHEDITKDKTSTVEACLPLELTKNESCLNSRETSFITNGSCLASRKTSFMMALCLSSIYEDLKMYQVEFKTMNAKLLMDPKRQIFLDQNMLAVIDELMQALNFNSETVPQKSSLEEPDFYKTKIKLCILLHAFRIRAVTIDRVMSYLNASDKTHTCPPCPAPEDEGGPSVFLFPPKPKDTLMISRTPEVTCVVVDVSHEDPEVKFNWYVDGVEVHNAKTKPREEQYNSTYRVVSVLTVLHQDWLNGKEYKCKVSNKALPAPIEKTISKAKGQPREPQVYVYPPSREEMTKNQVSLTCLVKGFYPSDIAVEWESNGQPENNYKTTPPVLDEDGSFALVSKLTVDKSRWQQGNVFSCSVMHEALHNHYTQKSLSLSPGK

SEQ ID NO: 161 - protein, 953 aa, Artificial Sequence
  Synthetic Construct
EVQLVESGGGLVQPGGSLRLSCAASGFNIKDTYIHWVRQAPGKGLEWVARIYPTNGYTRYADSVKGRFTISADTSKNTAYLQMNSLRAEDTAVYYCSRWGGDGFYAMDYWGQGTLVTVSSASTKGPSVFPLAPSSKSTSGGTAALGCLVKDYFPEPVTVSWNSGALTSGVHTFPAVLQSSGLYSLSSVVTVPSSSLGTQTYICNVNHKPSNTKVDKKVEPKSCDKPGSGIWELKKDVYVVELDWYPDAPGEMVVLTCDTPEEDGITWTLDQSSEVLGSGKTLTIQVKAAGDAGQYTCHKGGEVLSHSLLLLHKKEDGIWSTDILKDQKEPKNKTFLRCEAKNYSGRFTCWWLTTISTDLTFSVKSSRGSSDPQGVTCGAATLSAERVRGDNKEYEYSVECQEDSACPAAEESLPIEVMVDAVHKLKYENYTSSFFIRDIIKPDPPKNLQLKPLKNSRQVEVSWEYPDTWSTPHSYFSLTFCVQVQGKSKREKKDRVFTDKTSATVICRKNASISVRAQDRYYSSSWSEWASVPCSGGGGSGGGGSGGGGSGGGGSGRAVPGGSSPAWTQCQQLSQKLCTLAWSAHPLVGHMDLREEGDEETTNDVPHIQCGDGCDPQGLRDNSQFCLQRIHQGLIFYEKLLGSDIFTGEPSLLPDSPVGQLHASLLGLSQLLQPEGHHWETQQIPSLSPSQPWQRLLLRFKILRSLQAFVAVAARVFAHGAATLSPDKTHTCPPCPAPEDEGGPSVFLFPPKPKDTLMISRTPEVTCVVVDVSHEDPEVKFNWYVDGVEVHNAKTKPREEQYNSTYRVVSVLTVLHQDWLNGKEYKCKVSNKALPAPIEKTISKAKGQPREPQVYVYPPSREEMTKNQVSLTCLVKGFYPSDIAVEWESNGQPENNYKTTPPVLDEDGSFALVSKLTVDKSRWQQGNVFSCSVMHEALHNHYTQKSLSLSPGK

SEQ ID NO: 162 - protein, 117 aa, Artificial Sequence
  Synthetic Construct
QLQQSGTVLARPGASVKMSCKASGYSFTRYWMHWIKQRPGQGLEWIGAIYPGNSDTSYNQKFEGKAKLTAVTSASTAYMELSSLTHEDSAVYYCSRDYGYYFDFWGQGTTLTVSSAS

SEQ ID NO: 163 - protein, 103 aa, Artificial Sequence
  Synthetic Construct
QIVSTQSPAIMSASPGEKVTMTCSASSSRSYMQWYQQKPGTSPKRWIYDTSKLASGVPARFSGSGSGTSYSLTISSMEAEDAATYYCHQRSSYTFGGGTKLEI

SEQ ID NO: 164 - protein, 445 aa, Artificial Sequence
  Synthetic Construct
QLQQSGTVLARPGASVKMSCKASGYSFTRYWMHWIKQRPGQGLEWIGAIYPGNSDTSYNQKFEGKAKLTAVTSASTAYMELSSLTHEDSAVYYCSRDYGYYFDFWGQGTTLTVSSASTKGPSVFPLAPSSKSTSGGTAALGCLVKDYFPEPVTVSWNSGALTSGVHTFPAVLQSSGLYSLSSVVTVPSSSLGTQTYICNVNHKPSNTKVDKKVEPKSCDKTHTCPPCPAPELLGGPSVFLFPPKPKDTLMISRTPEVTCVVVDVSHEDPEVKFNWYVDGVEVHNAKTKPREEQYASTYRVVSVLTVLHQDWLNGKEYKCKVSNKALPAPIEKTISKAKGQPREPQVYTLPPSRDELTKNQVSLTCLVKGFYPSDIAVEWESNGQPENNYKTTPPVLDSDGSFFLYSKLTVDKSRWQQGNVFSCSVMHEALHNHYTQKSLSLSPGK

SEQ ID NO: 165 - protein, 211 aa, Artificial Sequence
  Synthetic Construct
QIVSTQSPAIMSASPGEKVTMTCSASSSRSYMQWYQQKPGTSPKRWIYDTSKLASGVPARFSGSGSGTSYSLTISSMEAEDAATYYCHQRSSYTFGGGTKLEIKRTVAAPSVFIFPPSDEQLKSGTASVVCLLNNFYPREAKVQWKVDNALQSGNSQESVTEQDSKDSTYSLSSTLTLSKADYEKHKVYACEVTHQGLSSPVTKSFNRGEC

SEQ ID NO: 166 - protein, 446 aa, Artificial Sequence
  Synthetic Construct
QLQQSGTVLARPGASVKMSCKASGYSFTRYWMHWIKQRPGQGLEWIGAIYPGNSDTSYNQKFEGKAKLTAVTSASTAYMELSSLTHEDSAVYYCSRDYGYYFDFWGQGTTLTVSSASTKGPSVFPLAPSSKSTSGGTAALGCLVKDYFPEPVTVSWNSGALTSGVHTFPAVLQSSGLYSLSSVVTVPSSSLGTQTYICNVNHKPSNTKVDKRVEPPKSCDKTHTCPPCPAPELLGGPSVFLFPPKPKDTLMISRTPEVTCVVVDVSHEDPEVKFNWYVDGVEVHNAKTKPREEQYNSTYRVVSVLTVLHQDWLNGKEYKCKVSNKALPAPIEKTISKAKGQPREPQVYTLPPSRDELTKNQVSLTCLVKGFYPSDIAVEWESNGQPENNYKTTPPVLDSDGSFFLYSKLTVDKSRWQQGNVFSCSVMHEALHNHYTQKSLSLSPGK

SEQ ID NO: 167 - protein, 210 aa, Artificial Sequence
  Synthetic Construct
QIVSTQSPAIMSASPGEKVTMTCSASSSRSYMQWYQQKPGTSPKRWIYDTSKLASGVPARFSGSGSGTSYSLTISSMEAEDAATYYCHQRSSYTFGGGTKLEIKRTVAAPSVFIFPPSDEQLKSGTASVVCLLNNFYPREAKVQWKVDNALQSGNSQESVTEQDSKDSTYSLSSTLTLSKADYEKHKVYACEVTHQGLSSPVTKSFNRGE

SEQ ID NO: 168 - protein, 445 aa, Artificial Sequence
  Synthetic Construct
QLQQSGTVLARPGASVKMSCKASGYSFTRYWMHWIKQRPGQGLEWIGAIYPGNSDTSYNQKFEGKAKLTAVTSASTAYMELSSLTHEDSAVYYCSRDYGYYFDFWGQGTTLTVSSASTKGPSVFPLAPSSKSTSGGTAALGCLVKDYFPEPVTVSWNSGALTSGVHTFPAVLQSSGLYSLSSVVTVPSSSLGTQTYICNVNHKPSNTKVDKKVEPKSCDKTHTCPPCPAPEKKGGPSVFLFPPKPKDTLMISRTPEVTCVVVDVSHEDPEVKFNWYVDGVEVHNAKTKPREEQYNSTYRVVSVLTVLHQDWLNGKEYKCKVSNKALPAPIEKTISKAKGQPREPQVYVLPPSREEMTKNQVSLLCLVKGFYPSDIAVEWESNGQPENRYMTWPPVLDSDGSFFLYSKLTVDKSRWQQGNVFSCSVMHEALHNHYTQKSLSLSPGK

SEQ ID NO: 169 - protein, 581 aa, Artificial Sequence
  Synthetic Construct
QLQQSGTVLARPGASVKMSCKASGYSFTRYWMHWIKQRPGQGLEWIGAIYPGNSDTSYNQKFEGKAKLTAVTSASTAYMELSSLTHEDSAVYYCSRDYGYYFDFWGQGTTLTVSSASTKGPSVFPLAPSSKSTSGGTAALGCLVKDYFPEPVTVSWNSGALTSGVHTFPAVLQSSGLYSLSSVVTVPSSSLGTQTYICNVNHKPSNTKVDKKVEPKSCDKPAPTSSSTKKTQLQLEHLLLDLQMILNGINNYKNPKLTDMLTFEFYMPKKATELKHLQCLERELKPLEEVLNLAQSKNFHLRPRDLISNINVIVLELKGSETTFMCEYADETATIVEFLNRWITFCQSIISTLTDKTHTCPPCPAPEDEGGPSVFLFPPKPKDTLMISRTPEVTCVVVDVSHEDPEVKFNWYVDGVEVHNAKTKPREEQYNSTYRVVSVLTVLHQDWLNGKEYKCKVSNKALPAPIEKTISKAKGQPREPQVYVYPPSREEMTKNQVSLTCLVKGFYPSDIAVEWESNGQPENNYKTTPPVLDEDGSFALVSKLTVDKSRWQQGNVFSCSVMHEALHNHYTQKSLSLSPGK

SEQ ID NO: 170 - protein, 620 aa, Artificial Sequence
  Synthetic Construct
QLQQSGTVLARPGASVKMSCKASGYSFTRYWMHWIKQRPGQGLEWIGAIYPGNSDTSYNQKFEGKAKLTAVTSASTAYMELSSLTHEDSAVYYCSRDYGYYFDFWGQGTTLTVSSASTKGPSVFPLAPSSKSTSGGTAALGCLVKDYFPEPVTVSWNSGALTSGVHTFPAVLQSSGLYSLSSVVTVPSSSLGTQTYICNVNHKPSNTKVDKKVEPKSCDKPGSGGGGGCDLPQTHSLGSRRTLMLLAQMRKISLFSCAKDRHDFGFPQEEFGNQFQKAETIPVLHEMIQQIFNLFSTKDSSAAWDETLLDKFYTELYQQLNDLEACVIQGVGVTETPLMKEDSILAVRKYFQRITLYLKEKKYSPCAWEVVRAEIMRSFSLSTNLQESLRSKEDKTHTCPPCPAPEDEGGPSVFLFPPKPKDTLMISRTPEVTCVVVDVSHEDPEVKFNWYVDGVEVHNAKTKPREEQYNSTYRVVSVLTVLHQDWLNGKEYKCKVSNKALPAPIEKTISKAKGQPREPQVYVYPPSREEMTKNQVSLTCLVKGFYPSDIAVEWESNGQPENNYKTTPPVLDEDGSFALVSKLTVDKSRWQQGNVFSCSVMHEALHNHYTQKSLSLSPGK

SEQ ID NO: 171 - protein, 748 aa, Artificial Sequence
  Synthetic Construct
QLQQSGTVLARPGASVKMSCKASGYSFTRYWMHWIKQRPGQGLEWIGAIYPGNSDTSYNQKFEGKAKLTAVTSASTAYMELSSLTHEDSAVYYCSRDYGYYFDFWGQGTTLTVSSASTKGPSVFPLAPSSKSTSGGTAALGCLVKDYFPEPVTVSWNSGALTSGVHTFPAVLQSSGLYSLSSVVTVPSSSLGTQTYICNVNHKPSNTKVDKKVEPKSCDKPGSGQDPYVKEAENLKKYFNAGHSDVVDNGTLFLGILKNWKEESDRKIMQSQIVSFYFKLFKNFKDDQSIQKSVETIKEDMNVKFFNSNKKKRDDFEKLTNYSVTDLNVQRKAIHELIQVMAELSPAAKTGKRKRSQMLFRGFEGGGSGGGGSGGGGSGGGGSQDPYVKEAENLKKYFNAGHSDVVDNGTLFLGILKNWKEESDRKIMQSQIVSFYFKLFKNFKDDQSIQKSVETIKEDMNVKFFNSNKKKRDDFEKLTNYSVTDLNVQRKAIHELIQVMAELSPAAKTGKRKRSQMLFRGDKTHTCPPCPAPEDEGGPSVFLFPPKPKDTLMISRTPEVTCVVVDVSHEDPEVKFNWYVDGVEVHNAKTKPREEQYNSTYRVVSVLTVLHQDWLNGKEYKCKVSNKALPAPIEKTISKAKGQPREPQVYVYPPSREEMTKNQVSLTCLVKGFYPSDIAVEWESNGQPENNYKTTPPVLDEDGSFALVSKLTVDKSRWQQGNVFSCSVMHEALHNHYTQKSLSLSPGK

SEQ ID NO: 172 - protein, 792 aa, Artificial Sequence
  Synthetic Construct
QLQQSGTVLARPGASVKMSCKASGYSFTRYWMHWIKQRPGQGLEWIGAIYPGNSDTSYNQKFEGKAKLTAVTSASTAYMELSSLTHEDSAVYYCSRDYGYYFDFWGQGTTLTVSSASTKGPSVFPLAPSSKSTSGGTAALGCLVKDYFPEPVTVSWNSGALTSGVHTFPAVLQSSGLYSLSSVVTVPSSSLGTQTYICNVNHKPSNTKVDKKVEPKSCDKPGSGSPGQGTQSENSCTHFPGNLPNMLRDLADAFSRVKTFFQMKDQLDNLLLKESLLEDFKGYLGCQALSEMIQFYLEEVMPQAENQDPDIKAHVNSLGENLKTLRLRLRRCHRFLPCENKSKAVEQVKNAFNKLQEKGIYKAMSEFDIFINYIEAYMTMKIRNFEGGGSGGGGSGGGGSGGGGSSPGQGTQSENSCTHFPGNLPNMLRDLADAFSRVKTFFQMKDQLDNLLLKESLLEDFKGYLGCQALSEMIQFYLEEVMPQAENQDPDIKAHVNSLGENLKTLRLRLRRCHRFLPCENKSKAVEQVKNAFNKLQEKGIYKAMSEFDIFINYIEAYMTMKIRNDKTHTCPPCPAPEDEGGPSVFLFPPKPKDTLMISRTPEVTCVVVDVSHEDPEVKFNWYVDGVEVHNAKTKPREEQYNSTYRVVSVLTVLHQDWLNGKEYKCKVSNKALPAPIEKTISKAKGQPREPQVYVYPPSREEMTKNQVSLTCLVKGFYPSDIAVEWESNGQPENNYKTTPPVLDEDGSFALVSKLTVDKSRWQQGNVFSCSVMHEALHNHYTQKSLSLSPGK

SEQ ID NO: 173 - protein, 975 aa, Artificial Sequence
  Synthetic Construct
QLQQSGTVLARPGASVKMSCKASGYSFTRYWMHWIKQRPGQGLEWIGAIYPGNSDTSYNQKFEGKAKLTAVTSASTAYMELSSLTHEDSAVYYCSRDYGYYFDFWGQGTTLTVSSASTKGPSVFPLAPSSKSTSGGTAALGCLVKDYFPEPVTVSWNSGALTSGVHTFPAVLQSSGLYSLSSVVTVPSSSLGTQTYICNVNHKPSNTKVDKKVEPKSCDKPGSGIWELKKDVYVVELDWYPDAPGEMVVLTCDTPEEDGITWTLDQSSEVLGSGKTLTIQVKAAGDAGQYTCHKGGEVLSHSLLLLHKKEDGIWSTDILKDQKEPKNKTFLRCEAKNYSGRFTCWWLTTISTDLTFSVKSSRGSSDPQGVTCGAATLSAERVRGDNKEYEYSVECQEDSACPAAEESLPIEVMVDAVHKLKYENYTSSFFIRDIIKPDPPKNLQLKPLKNSRQVEVSWEYPDTWSTPHSYFSLTFCVQVQGKSKREKKDRVFTDKTSATVICRKNASISVRAQDRYYSSSWSEWASVPCSGGGGSGGGGSGGGGSGGGGSGRNLPVATPDPGMFPCLHHSQNLLRAVSNMLQKARQTLEFYPCTSEEIDHEDITKDKTSTVEACLPLELTKNESCLNSRETSFITNGSCLASRKTSFMMALCLSSIYEDLKMYQVEFKTMNAKLLMDPKRQIFLDQNMLAVIDELMQALNFNSETVPQKSSLEEPDFYKTKIKLCILLHAFRIRAVTIDRVMSYLNASDKTHTCPPCPAPEDEGGPSVFLFPPKPKDTLMISRTPEVTCVVVDVSHEDPEVKFNWYVDGVEVHNAKTKPREEQYNSTYRVVSVLTVLHQDWLNGKEYKCKVSNKALPAPIEKTISKAKGQPREPQVYVYPPSREEMTKNQVSLTCLVKGFYPSDIAVEWESNGQPENNYKTTPPVLDEDGSFALVSKLTVDKSRWQQGNVFSCSVMHEALHNHYTQKSLSLSPGK

SEQ ID NO: 174 - protein, 948 aa, Artificial Sequence
  Synthetic Construct
QLQQSGTVLARPGASVKMSCKASGYSFTRYWMHWIKQRPGQGLEWIGAIYPGNSDTSYNQKFEGKAKLTAVTSASTAYMELSSLTHEDSAVYYCSRDYGYYFDFWGQGTTLTVSSASTKGPSVFPLAPSSKSTSGGTAALGCLVKDYFPEPVTVSWNSGALTSGVHTFPAVLQSSGLYSLSSVVTVPSSSLGTQTYICNVNHKPSNTKVDKKVEPKSCDKPGSGIWELKKDVYVVELDWYPDAPGEMVVLTCDTPEEDGITWTLDQSSEVLGSGKTLTIQVKAAGDAGQYTCHKGGEVLSHSLLLLHKKEDGIWSTDILKDQKEPKNKTFLRCEAKNYSGRFTCWWLTTISTDLTFSVKSSRGSSDPQGVTCGAATLSAERVRGDNKEYEYSVECQEDSACPAAEESLPIEVMVDAVHKLKYENYTSSFFIRDIIKPDPPKNLQLKPLKNSRQVEVSWEYPDTWSTPHSYFSLTFCVQVQGKSKREKKDRVFTDKTSATVICRKNASISVRAQDRYYSSSWSEWASVPCSGGGGSGGGGSGGGGSGGGGSGRAVPGGSSPAWTQCQQLSQKLCTLAWSAHPLVGHMDLREEGDEETTNDVPHIQCGDGCDPQGLRDNSQFCLQRIHQGLIFYEKLLGSDIFTGEPSLLPDSPVGQLHASLLGLSQLLQPEGHHWETQQIPSLSPSQPWQRLLLRFKILRSLQAFVAVAARVFAHGAATLSPDKTHTCPPCPAPEDEGGPSVFLFPPKPKDTLMISRTPEVTCVVVDVSHEDPEVKFNWYVDGVEVHNAKTKPREEQYNSTYRVVSVLTVLHQDWLNGKEYKCKVSNKALPAPIEKTISKAKGQPREPQVYVYPPSREEMTKNQVSLTCLVKGFYPSDIAVEWESNGQPENNYKTTPPVLDEDGSFALVSKLTVDKSRWQQGNVFSCSVMHEALHNHYTQKSLSLSPGK

SEQ ID NO: 175 - protein, 273 aa, Homo sapiens
MIFLLLMLSLELQLHQIAALFTVTVPKELYIIEHGSNVTLECNFDTGSHVNLGAITASLQKVENDTSPHRERATLLEEQLPLGKASFHIPQVQVRDEGQYQCIIIYGVAWDYKYLTLKVKASYRKINTHILKVPETDEVELTCQATGYPLAEVSWPNVSVPANTSHSRTPEGLYQVTSVLRLKPPPGRNFSCVFWNTHVRELTLASIDLQSQMEPRTHPTWLLHIFIPFCIIAFIFIATVIALRKQLCQKLYSSKDTTKRPVTTTKREVNSAI

SEQ ID NO: 176 - protein, 201 aa, Homo sapiens
LFTVTVPKELYIIEHGSNVTLECNFDTGSHVNLGAITASLQKVENDTSPHRERATLLEEQLPLGKASFHIPQVQVRDEGQYQCIIIYGVAWDYKYLTLKVKASYRKINTHILKVPETDEVELTCQATGYPLAEVSWPNVSVPANTSHSRTPEGLYQVTSVLRLKPPPGRNFSCVFWNTHVRELTLASIDLQSQMEPRTHPT

SEQ ID NO: 177 - protein, 428 aa, Artificial Sequence
  Synthetic Construct
LFTVTVPKELYIIEHGSNVTLECNFDTGSHVNLGAITASLQKVENDTSPHRERATLLEEQLPLGKASFHIPQVQVRDEGQYQCIIIYGVAWDYKYLTLKVKASYRKINTHILKVPETDEVELTCQATGYPLAEVSWPNVSVPANTSHSRTPEGLYQVTSVLRLKPPPGRNFSCVFWNTHVRELTLASIDLQSQMEPRTHPTDKTHTCPPCPAPELLGGPSVFLFPPKPKDTLMISRTPEVTCVVVDVSHEDPEVKFNWYVDGVEVHNAKTKPREEQYASTYRVVSVLTVLHQDWLNGKEYKCKVSNKALPAPIEKTISKAKGQPREPQVYTLPPSRDELTKNQVSLTCLVKGFYPSDIAVEWESNGQPENNYKTTPPVLDSDGSFFLYSKLTVDKSRWQQGNVFSCSVMHEALHNHYTQKSLSLSPGK

SEQ ID NO: 178 - protein, 428 aa, Artificial Sequence
  Synthetic Construct
LFTVTVPKELYIIEHGSNVTLECNFDTGSHVNLGAITASLQKVENDTSPHRERATLLEEQLPLGKASFHIPQVQVRDEGQYQCIIIYGVAWDYKYLTLKVKASYRKINTHILKVPETDEVELTCQATGYPLAEVSWPNVSVPANTSHSRTPEGLYQVTSVLRLKPPPGRNFSCVFWNTHVRELTLASIDLQSQMEPRTHPTDKTHTCPPCPAPEKKGGPSVFLFPPKPKDTLMISRTPEVTCVVVDVSHEDPEVKFNWYVDGVEVHNAKTKPREEQYNSTYRVVSVLTVLHQDWLNGKEYKCKVSNKALPAPIEKTISKAKGQPREPQVYVLPPSREEMTKNQVSLLCLVKGFYPSDIAVEWESNGQPENRYMTWPPVLDSDGSFFLYSKLTVDKSRWQQGNVFSCSVMHEALHNHYTQKSLSLSPGK

SEQ ID NO: 179 - protein, 433 aa, Artificial Sequence
  Synthetic Construct
LFTVTVPKELYIIEHGSNVTLECNFDTGSHVNLGAITASLQKVENDTSPHRERATLLEEQLPLGKASFHIPQVQVRDEGQYQCIIIYGVAWDYKYLTLKVKASYRKINTHILKVPETDEVELTCQATGYPLAEVSWPNVSVPANTSHSRTPEGLYQVTSVLRLKPPPGRNFSCVFWNTHVRELTLASIDLQSQMEPRTHPTGGGGSDKTHTCPPCPAPEKKGGPSVFLFPPKPKDTLMISRTPEVTCVVVDVSHEDPEVKFNWYVDGVEVHNAKTKPREEQYNSTYRVVSVLTVLHQDWLNGKEYKCKVSNKALPAPIEKTISKAKGQPREPQVYVLPPSREEMTKNQVSLLCLVKGFYPSDIAVEWESNGQPENRYMTWPPVLDSDGSFFLYSKLTVDKSRWQQGNVFSCSVMHEALHNHYTQKSLSLSPGK

SEQ ID NO: 180 - protein, 566 aa, Artificial Sequence
  Synthetic Construct
LFTVTVPKELYIIEHGSNVTLECNFDTGSHVNLGAITASLQKVENDTSPHRERATLLEEQLPLGKASFHIPQVQVRDEGQYQCIIIYGVAWDYKYLTLKVKASYRKINTHILKVPETDEVELTCQATGYPLAEVSWPNVSVPANTSHSRTPEGLYQVTSVLRLKPPPGRNFSCVFWNTHVRELTLASIDLQSQMEPRTHPTGGGGSAPTSSSTKKTQLQLEHLLLDLQMILNGINNYKNPKLTDMLTFEFYMPKKATELKHLQCLERELKPLEEVLNLAQSKNFHLRPRDLISNINVIVLELKGSETTFMCEYADETATIVEFLNRWITFCQSIISTLTDKTHTCPPCPAPEDEGGPSVFLFPPKPKDTLMISRTPEVTCVVVDVSHEDPEVKFNWYVDGVEVHNAKTKPREEQYNSTYRVVSVLTVLHQDWLNGKEYKCKVSNKALPAPIEKTISKAKGQPREPQVYVYPPSREEMTKNQVSLTCLVKGFYPSDIAVEWESNGQPENNYKTTPPVLDEDGSFALVSKLTVDKSRWQQGNVFSCSVMHEALHNHYTQKSLSLSPGK

SEQ ID NO: 181 - protein, 435 aa, Artificial Sequence
  Synthetic Construct
LFTVTVPKELYIIEHGSNVTLECNFDTGSHVNLGAITASLQKVENDTSPHRERATLLEEQLPLGKASFHIPQVQVRDEGQYQCIIIYGVAWDYKYLTLKVKASYRKINTHILKVPETDEVELTCQATGYPLAEVSWPNVSVPANTSHSRTPEGLYQVTSVLRLKPPPGRNFSCVFWNTHVRELTLASIDLQSQMEPRTHPTGSGGGGGDKTHTCPPCPAPEKKGGPSVFLFPPKPKDTLMISRTPEVTCVVVDVSHEDPEVKFNWYVDGVEVHNAKTKPREEQYNSTYRVVSVLTVLHQDWLNGKEYKCKVSNKALPAPIEKTISKAKGQPREPQVYVLPPSREEMTKNQVSLLCLVKGFYPSDIAVEWESNGQPENRYMTWPPVLDSDGSFFLYSKLTVDKSRWQQGNVFSCSVMHEALHNHYTQKSLSLSPGK

SEQ ID NO: 182 - protein, 600 aa, Artificial Sequence
  Synthetic Construct
LFTVTVPKELYIIEHGSNVTLECNFDTGSHVNLGAITASLQKVENDTSPHRERATLLEEQLPLGKASFHIPQVQVRDEGQYQCIIIYGVAWDYKYLTLKVKASYRKINTHILKVPETDEVELTCQATGYPLAEVSWPNVSVPANTSHSRTPEGLYQVTSVLRLKPPPGRNFSCVFWNTHVRELTLASIDLQSQMEPRTHPTGSGGGGGCDLPQTHSLGSRRTLMLLAQMRKISLFSCAKDRHDFGFPQEEFGNQFQKAETIPVLHEMIQQIFNLFSTKDSSAAWDETLLDKFYTELYQQLNDLEACVIQGVGVTETPLMKEDSILAVRKYFQRITLYLKEKKYSPCAWEVVRAEIMRSFSLSTNLQESLRSKEDKTHTCPPCPAPEDEGGPSVFLFPPKPKDTLMISRTPEVTCVVVDVSHEDPEVKFNWYVDGVEVHNAKTKPREEQYNSTYRVVSVLTVLHQDWLNGKEYKCKVSNKALPAPIEKTISKAKGQPREPQVYVYPPSREEMTKNQVSLTCLVKGFYPSDIAVEWESNGQPENNYKTTPPVLDEDGSFALVSKLTVDKSRWQQGNVFSCSVMHEALHNHYTQKSLSLSPGK

SEQ ID NO: 183 - protein, 732 aa, Artificial Sequence
  Synthetic Construct
LFTVTVPKELYIIEHGSNVTLECNFDTGSHVNLGAITASLQKVENDTSPHRERATLLEEQLPLGKASFHIPQVQVRDEGQYQCIIIYGVAWDYKYLTLKVKASYRKINTHILKVPETDEVELTCQATGYPLAEVSWPNVSVPANTSHSRTPEGLYQVTSVLRLKPPPGRNFSCVFWNTHVRELTLASIDLQSQMEPRTHPTGSGGGGGQDPYVKEAENLKKYFNAGHSDVVDNGTLFLGILKNWKEESDRKIMQSQIVSFYFKLFKNFKDDQSIQKSVETIKEDMNVKFFNSNKKKRDDFEKLTNYSVTDLNVQRKAIHELIQVMAELSPAAKTGKRKRSQMLFRGFEGGGSGGGGSGGGGSGGGGSQDPYVKEAENLKKYFNAGHSDVVDNGTLFLGILKNWKEESDRKIMQSQIVSFYFKLFKNFKDDQSIQKSVETIKEDMNVKFFNSNKKKRDDFEKLTNYSVTDLNVQRKAIHELIQVMAELSPAAKTGKRKRSQMLFRGDKTHTCPPCPAPEDEGGPSVFLFPPKPKDTLMISRTPEVTCVVVDVSHEDPEVKFNWYVDGVEVHNAKTKPREEQYNSTYRVVSVLTVLHQDWLNGKEYKCKVSNKALPAPIEKTISKAKGQPREPQVYVYPPSREEMTKNQVSLTCLVKGFYPSDIAVEWESNGQPENNYKTTPPVLDEDGSFALVSKLTVDKSRWQQGNVFSCSVMHEALHNHYTQKSLSLSPGK

SEQ ID NO: 184 - protein, 776 aa, Artificial Sequence
  Synthetic Construct
LFTVTVPKELYIIEHGSNVTLECNFDTGSHVNLGAITASLQKVENDTSPHRERATLLEEQLPLGKASFHIPQVQVRDEGQYQCIIIYGVAWDYKYLTLKVKASYRKINTHILKVPETDEVELTCQATGYPLAEVSWPNVSVPANTSHSRTPEGLYQVTSVLRLKPPPGRNFSCVFWNTHVRELTLASIDLQSQMEPRTHPTGSGGGGGSPGQGTQSENSCTHFPGNLPNMLRDLADAFSRVKTFFQMKDQLDNLLLKESLLEDFKGYLGCQALSEMIQFYLEEVMPQAENQDPDIKAHVNSLGENLKTLRLRLRRCHRFLPCENKSKAVEQVKNAFNKLQEKGIYKAMSEFDIFINYIEAYMTMKIRNFEGGGSGGGGSGGGGSGGGGSSPGQGTQSENSCTHFPGNLPNMLRDLADAFSRVKTFFQMKDQLDNLLLKESLLEDFKGYLGCQALSEMIQFYLEEVMPQAENQDPDIKAHVNSLGENLKTLRLRLRRCHRFLPCENKSKAVEQVKNAFNKLQEKGIYKAMSEFDIFINYIEAYMTMKIRNDKTHTCPPCPAPEDEGGPSVFLFPPKPKDTLMISRTPEVTCVVVDVSHEDPEVKFNWYVDGVEVHNAKTKPREEQYNSTYRVVSVLTVLHQDWLNGKEYKCKVSNKALPAPIEKTISKAKGQPREPQVYVYPPSREEMTKNQVSLTCLVKGFYPSDIAVEWESNGQPENNYKTTPPVLDEDGSFALVSKLTVDKSRWQQGNVFSCSVMHEALHNHYTQKSLSLSPGK

SEQ ID NO: 185 - protein, 431 aa, Artificial Sequence
  Synthetic Construct
LFTVTVPKELYIIEHGSNVTLECNFDTGSHVNLGAITASLQKVENDTSPHRERATLLEEQLPLGKASFHIPQVQVRDEGQYQCIIIYGVAWDYKYLTLKVKASYRKINTHILKVPETDEVELTCQATGYPLAEVSWPNVSVPANTSHSRTPEGLYQVTSVLRLKPPPGRNFSCVFWNTHVRELTLASIDLQSQMEPRTHPTGSGDKTHTCPPCPAPEKKGGPSVFLFPPKPKDTLMISRTPEVTCVVVDVSHEDPEVKFNWYVDGVEVHNAKTKPREEQYNSTYRVVSVLTVLHQDWLNGKEYKCKVSNKALPAPIEKTISKAKGQPREPQVYVLPPSREEMTKNQVSLLCLVKGFYPSDIAVEWESNGQPENRYMTWPPVLDSDGSFFLYSKLTVDKSRWQQGNVFSCSVMHEALHNHYTQKSLSLSPGK

SEQ ID NO: 186 - protein, 955 aa, Artificial Sequence
  Synthetic Construct
LFTVTVPKELYIIEHGSNVTLECNFDTGSHVNLGAITASLQKVENDTSPHRERATLLEEQLPLGKASFHIPQVQVRDEGQYQCIIIYGVAWDYKYLTLKVKASYRKINTHILKVPETDEVELTCQATGYPLAEVSWPNVSVPANTSHSRTPEGLYQVTSVLRLKPPPGRNFSCVFWNTHVRELTLASIDLQSQMEPRTHPTGSGIWELKKDVYVVELDWYPDAPGEMVVLTCDTPEEDGITWTLDQSSEVLGSGKTLTIQVKAAGDAGQYTCHKGGEVLSHSLLLLHKKEDGIWSTDILKDQKEPKNKTFLRCEAKNYSGRFTCWWLTTISTDLTFSVKSSRGSSDPQGVTCGAATLSAERVRGDNKEYEYSVECQEDSACPAAEESLPIEVMVDAVHKLKYENYTSSFFIRDIIKPDPPKNLQLKPLKNSRQVEVSWEYPDTWSTPHSYFSLTFCVQVQGKSKREKKDRVFTDKTSATVICRKNASISVRAQDRYYSSSWSEWASVPCSGGGGSGGGGSGGGGSGGGGSGRNLPVATPDPGMFPCLHHSQNLLRAVSNMLQKARQTLEFYPCTSEEIDHEDITKDKTSTVEACLPLELTKNESCLNSRETSFITNGSCLASRKTSFMMALCLSSIYEDLKMYQVEFKTMNAKLLMDPKRQIFLDQNMLAVIDELMQALNFNSETVPQKSSLEEPDFYKTKIKLCILLHAFRIRAVTIDRVMSYLNASDKTHTCPPCPAPEDEGGPSVFLFPPKPKDTLMISRTPEVTCVVVDVSHEDPEVKFNWYVDGVEVHNAKTKPREEQYNSTYRVVSVLTVLHQDWLNGKEYKCKVSNKALPAPIEKTISKAKGQPREPQVYVYPPSREEMTKNQVSLTCLVKGFYPSDIAVEWESNGQPENNYKTTPPVLDEDGSFALVSKLTVDKSRWQQGNVFSCSVMHEALHNHYTQKSLSLSPGK

SEQ ID NO: 187 - protein, 928 aa, Artificial Sequence
  Synthetic Construct
LFTVTVPKELYIIEHGSNVTLECNFDTGSHVNLGAITASLQKVENDTSPHRERATLLEEQLPLGKASFHIPQVQVRDEGQYQCIIIYGVAWDYKYLTLKVKASYRKINTHILKVPETDEVELTCQATGYPLAEVSWPNVSVPANTSHSRTPEGLYQVTSVLRLKPPPGRNFSCVFWNTHVRELTLASIDLQSQMEPRTHPTGSGIWELKKDVYVVELDWYPDAPGEMVVLTCDTPEEDGITWTLDQSSEVLGSGKTLTIQVKAAGDAGQYTCHKGGEVLSHSLLLLHKKEDGIWSTDILKDQKEPKNKTFLRCEAKNYSGRFTCWWLTTISTDLTFSVKSSRGSSDPQGVTCGAATLSAERVRGDNKEYEYSVECQEDSACPAAEESLPIEVMVDAVHKLKYENYTSSFFIRDIIKPDPPKNLQLKPLKNSRQVEVSWEYPDTWSTPHSYFSLTFCVQVQGKSKREKKDRVFTDKTSATVICRKNASISVRAQDRYYSSSWSEWASVPCSGGGGSGGGGSGGGGSGGGGSGRAVPGGSSPAWTQCQQLSQKLCTLAWSAHPLVGHMDLREEGDEETTNDVPHIQCGDGCDPQGLRDNSQFCLQRIHQGLIFYEKLLGSDIFTGEPSLLPDSPVGQLHASLLGLSQLLQPEGHHWETQQIPSLSPSQPWQRLLLRFKILRSLQAFVAVAARVFAHGAATLSPDKTHTCPPCPAPEDEGGPSVFLFPPKPKDTLMISRTPEVTCVVVDVSHEDPEVKFNWYVDGVEVHNAKTKPREEQYNSTYRVVSVLTVLHQDWLNGKEYKCKVSNKALPAPIEKTISKAKGQPREPQVYVYPPSREEMTKNQVSLTCLVKGFYPSDIAVEWESNGQPENNYKTTPPVLDEDGSFALVSKLTVDKSRWQQGNVFSCSVMHEALHNHYTQKSLSLSPGK

SEQ ID NO: 188 - protein, 10 aa, Artificial Sequence
  Synthetic Construct
GFNIKDTYIH

SEQ ID NO: 189 - protein, 17 aa, Artificial Sequence
  Synthetic Construct
RIYPTNGYTRYADSVKG

SEQ ID NO: 190 - protein, 11 aa, Artificial Sequence
  Synthetic Construct
WGGDGFYAMDY

SEQ ID NO: 191 - protein, 11 aa, Artificial Sequence
  Synthetic Construct
RASQDVNTAVA

SEQ ID NO: 192 - protein, 7 aa, Artificial Sequence
  Synthetic Construct
SASFLYS

SEQ ID NO: 193 - protein, 9 aa, Artificial Sequence
  Synthetic Construct
QQHYTTPPT

SEQ ID NO: 194 - protein, 1 aa, Artificial Sequence
  Synthetic Construct
  VARIANT 1: Can be present in repeats of any integer
G

SEQ ID NO: 195 - protein, 2 aa, Artificial Sequence
  Synthetic Construct
  VARIANT (1)..(2): Can be present in repeats of any integer
GS

SEQ ID NO: 196 - protein, 3 aa, Artificial Sequence
  Synthetic Construct
  VARIANT (1)..(3): Can be present in repeats of any integer
GGS

SEQ ID NO: 197 - protein, 4 aa, Artificial Sequence
  Synthetic Construct
  VARIANT (1)..(4): Can be present in repeats of any integer
GGGS

SEQ ID NO: 198 - protein, 7 aa, Artificial Sequence
  Synthetic Construct
  VARIANT (1)..(3): Can be present in repeats of any integer
  VARIANT (4)..(7): Can be present in repeats of any integer
GGSGGGS

SEQ ID NO: 199 - protein, 5 aa, Artificial Sequence
  Synthetic Construct
  VARIANT (1)..(5): Can be present in repeats of any integer
GSGGS

SEQ ID NO: 200 - protein, 5 aa, Artificial Sequence
  Synthetic Construct
  VARIANT (1)..(5): Can be present in repeats of any integer
GGSGS

SEQ ID NO: 201 - protein, 5 aa, Artificial Sequence
  Synthetic Construct
  VARIANT (1)..(5): Can be present in repeats of any integer
GGGGS

SEQ ID NO: 202 - protein, 2 aa, Artificial Sequence
  Synthetic Construct
GG

SEQ ID NO: 203 - protein, 3 aa, Artificial Sequence
  Synthetic Construct
GSG

SEQ ID NO: 204 - protein, 4 aa, Artificial Sequence
  Synthetic Construct
GGSG

SEQ ID NO: 205 - protein, 5 aa, Artificial Sequence
  Synthetic Construct
GGSGG

SEQ ID NO: 206 - protein, 7 aa, Artificial Sequence
  Synthetic Construct
GSGGGGG

SEQ ID NO: 207 - protein, 5 aa, Artificial Sequence
  Synthetic Construct
GSGSG

SEQ ID NO: 208 - protein, 5 aa, Artificial Sequence
  Synthetic Construct
GSGGG

SEQ ID NO: 209 - protein, 5 aa, Artificial Sequence
  Synthetic Construct
GGGSG

SEQ ID NO: 210 - protein, 5 aa, Artificial Sequence
  Synthetic Construct
GSSSG

SEQ ID NO: 211 - protein, 6 aa, Artificial Sequence
  Synthetic Construct
GGSGGS

SEQ ID NO: 212 - protein, 6 aa, Artificial Sequence
  Synthetic Construct
SGGGGS

SEQ ID NO: 213 - protein, 5 aa, Artificial Sequence
  Synthetic Construct
GGGGS

SEQ ID NO: 214 - protein, 2 aa, Artificial Sequence
  Synthetic Construct
  VARIANT (1)..(2): Can be present in repeats of any integer
GA

SEQ ID NO: 215 - protein, 12 aa, Artificial Sequence
  Synthetic Construct
GRAGGGGAGGGG

SEQ ID NO: 216 - protein, 6 aa, Artificial Sequence
  Synthetic Construct
GRAGGG

SEQ ID NO: 217 - protein, 16 aa, Artificial Sequence
  Synthetic Construct
GSGGGSGGGGSGGGGS

SEQ ID NO: 218 - protein, 14 aa, Artificial Sequence
  Synthetic Construct
GGGSGGGGSGGGGS

SEQ ID NO: 219 - protein, 10 aa, Artificial Sequence
  Synthetic Construct
GGGSGGSGGS

SEQ ID NO: 220 - protein, 15 aa, Artificial Sequence
  Synthetic Construct
GGSGGSGGSGGSGGG

SEQ ID NO: 221 - protein, 16 aa, Artificial Sequence
  Synthetic Construct
GGSGGSGGGGSGGGGS

SEQ ID NO: 222 - protein, 18 aa, Artificial Sequence
  Synthetic Construct
GGSGGSGGSGGSGGSGGS

SEQ ID NO: 223 - protein, 18 aa, Artificial Sequence
  Synthetic Construct
GGGGGGSGGGGSGGGGSA

SEQ ID NO: 224 - protein, 21 aa, Artificial Sequence
  Synthetic Construct
GSGGGSGGGGSGGGGSGGGGS

SEQ ID NO: 225 - protein, 10 aa, Artificial Sequence
  Synthetic Construct
KTGGGSGGGS

SEQ ID NO: 226 - protein, 17 aa, Artificial Sequence
  Synthetic Construct
GGPGGGGSGGGSGGGGS

SEQ ID NO: 227 - protein, 19 aa, Artificial Sequence
  Synthetic Construct
GGGSGGGGSGGGGSGGGGS

SEQ ID NO: 228 - protein, 21 aa, Artificial Sequence
  Synthetic Construct
GGGGSGGGGSGGGGSGGGGSG

SEQ ID NO: 229 - protein, 15 aa, Artificial Sequence
  Synthetic Construct
GGGGSGGGGSGGGGS

SEQ ID NO: 230 - protein, 6 aa, Artificial Sequence
  Synthetic Construct
ASTKGP

SEQ ID NO: 231 - protein, 3 aa, Artificial Sequence
  Synthetic Construct
DKP

SEQ ID NO: 232 - protein, 5 aa, Artificial Sequence
  Synthetic Construct
DKPGS

SEQ ID NO: 233 - protein, 3 aa, Artificial Sequence
  Synthetic Construct
PGS

SEQ ID NO: 234 - protein, 2 aa, Artificial Sequence
  Synthetic Construct
GS

SEQ ID NO: 235 - protein, 6 aa, Artificial Sequence
  Synthetic Construct
DKPGSG

SEQ ID NO: 236 - protein, 4 aa, Artificial Sequence
  Synthetic Construct
PGSG

SEQ ID NO: 237 - protein, 7 aa, Artificial Sequence
  Synthetic Construct
DKPGSGS

SEQ ID NO: 238 - protein, 5 aa, Artificial Sequence
  Synthetic Construct
PGSGS

SEQ ID NO: 239 - protein, 4 aa, Artificial Sequence
  Synthetic Construct
GSGS

SEQ ID NO: 240 - protein, 10 aa, Artificial Sequence
  Synthetic Construct
DKPGSGGGGG

SEQ ID NO: 241 - protein, 8 aa, Artificial Sequence
  Synthetic Construct
PGSGGGGG

SEQ ID NO: 242 - protein, 1 aa, Artificial Sequence
  Synthetic Construct
P

SEQ ID NO: 243 - protein, 5 aa, Artificial Sequence
  Synthetic Construct
DSWIH

SEQ ID NO: 244 - protein, 10 aa, Artificial Sequence
  Synthetic Construct
WISPYGGSSY

SEQ ID NO: 245 - protein, 7 aa, Artificial Sequence
  Synthetic Construct
RHWPGGF

SEQ ID NO: 246 - protein, 6 aa, Artificial Sequence
  Synthetic Construct
VTTAVA

SEQ ID NO: 247 - protein, 6 aa, Artificial Sequence
  Synthetic Construct
SASFPY

SEQ ID NO: 248 - protein, 9 aa, Artificial Sequence
  Synthetic Construct
QQYMYHPST

SEQ ID NO: 249 - protein, 290 aa, Homo sapiens
MRIFAVFIFMTYWHLLNAFTVTVPKDLYVVEYGSNMTIECKFPVEKQLDLAALIVYWEMEDKNIIQFVHGEEDLKVQHSSYRQRARLLKDQLSLGNAALQITDVKLQDAGVYRCMISYGGADYKRITVKVNAPYNKINQRILVVDPVTSEHELTCQAEGYPKAEVIWTSSDHQVLSGKTTTTNSKREEKLFNVTSTLRINTTTNEIFYCTFRRLDPEENHTAELVIPELPLAHPPNERTHLVILGAILLCLGVALTFIFRLRKGRMMDVKKCGIQDTNSKKQSDTHLEET

SEQ ID NO: 250 - protein, 220 aa, Homo sapiens
FTVTVPKDLYVVEYGSNMTIECKFPVEKQLDLAALIVYWEMEDKNIIQFVHGEEDLKVQHSSYRQRARLLKDQLSLGNAALQITDVKLQDAGVYRCMISYGGADYKRITVKVNAPYNKINQRILVVDPVTSEHELTCQAEGYPKAEVIWTSSDHQVLSGKTTTTNSKREEKLFNVTSTLRINTTTNEIFYCTFRRLDPEENHTAELVIPELPLAHPPNER

SEQ ID NO: 251 - protein, 133 aa, Artificial Sequence
  Synthetic Construct
APTSSSTKKTQLQLEHLRLDLEMILNGINNYKNPKLTDMLTFEFYMPKKATELKHLQCLERELKPLEEVLNLAQSKNFHLRPRDLISNINVIVLELKGSETTFMCEYADETATIVEFLNRWITFCQSIISTLT

SEQ ID NO: 252 - protein, 133 aa, Artificial Sequence
  Synthetic Construct
APTSSSTKKTQLQLEHLLLDLQMILNGINNYKNPKLTDMLTFEFYMPKKATELKHLQCLERELKPLEEVLNLAQSKNFHLRPRDLISNINVIVLELKGSETTFMCEYADETATIVEFLNRWITFCTSIISTLT

SEQ ID NO: 253 - protein, 133 aa, Artificial Sequence
  Synthetic Construct
APTSSSTKKTQLQLEHLRLDLEMILNGINNYKNPKLTDMLTFEFYMPKKATELKHLQCLERELKPLEEVLNLAQSKNFHLRPRDLISNINVIVLELKGSETTFMCEYADETATIVEFLNRWITFCTSIISTLT

SEQ ID NO: 254 - protein, 133 aa, Artificial Sequence
  Synthetic Construct
APTSSSTKKTQLQLEHLRLDLEMILNGINNYKNPKLTDMLTFEFYMPKKATELKHLQCLERELKPLEEVLNLAQSKNFHLRPRDLISNINVIVLELKGSETTFMCEYADETATIVEFLNRWITFCTSIIRTLT

SEQ ID NO: 255 - protein, 220 aa, Artificial Sequence
  Synthetic Construct
FTVTVPKDLYVVEYGSNMTIECKFPVEKQLDLAALIVYWMMEDKNIIQFVHGEEDLKVQHSSYRQRARLLKDQLSLGNAALQITDVKLQDAGVYTCLIAYKGADYKRITVKVNAPYNKINQRILVVDPVTSEHELTCQAEGYPKAEVIWTSSDHQVLSGKTTTTNSKREEKLFNVTSTLRINTTTNEIFYCTFRRLDPEENHTAELVIPELPLAHPPNER

SEQ ID NO: 256 - protein, 220 aa, Artificial Sequence
  Synthetic Construct
FTVTVPKDLYVVEYGSNMTIECKFPVEKQLDLAALQVYWMMEDKNIIQFVHGEEDLKVQHSSYRQRARLLKDQLSLGNAALQITDVKLQDAGVYTCLIAYKGADYKRITVKVNAPYNKINQRILVVDPVTSEHELTCQAEGYPKAEVIWTSSDHQVLSGKTTTTNSKREEKLFNVTSTLRINTTTNEIFYCTFRRLDPEENHTAELVIPELPLAHPPNER

SEQ ID NO: 257 - protein, 220 aa, Artificial Sequence
  Synthetic Construct
FTVTVPKDLYVVEYGSNMTIECKFPVEKQLDLAALQVYWEMEDKNIIQFVHGEEDLKVQHSSYRQRARLLKDQLSLGNAALQITDVKLQDAGVYTCLIAYKGADYKRITVKVNAPYNKINQRILVVDPVTSEHELTCQAEGYPKAEVIWTSSDHQVLSGKTTTTNSKREEKLFNVTSTLRINTTTNEIFYCTFRRLDPEENHTAELVIPELPLAHPPNER

SEQ ID NO: 258 - protein, 220 aa, Artificial Sequence
  Synthetic Construct
FTVTVPKDLYVVEYGSNMTIECKFPVEKQLDLAALQVYWMMEDKNIIQFVHGEEDLKVQHSSYRQRARLLKDQLSLGNAALQITDVKLQDAGVYRCLIAYKGADYKRITVKVNAPYNKINQRILVVDPVTSEHELTCQAEGYPKAEVIWTSSDHQVLSGKTTTTNSKREEKLFNVTSTLRINTTTNEIFYCTFRRLDPEENHTAELVIPELPLAHPPNER

SEQ ID NO: 259 - protein, 220 aa, Artificial Sequence
  Synthetic Construct
FTVTVPKDLYVVEYGSNMTIECKFPVEKQLDLAALQVYWMMEDKNIIQFVHGEEDLKVQHSSYRQRARLLKDQLSLGNAALQITDVKLQDAGVYTCMIAYKGADYKRITVKVNAPYNKINQRILVVDPVTSEHELTCQAEGYPKAEVIWTSSDHQVLSGKTTTTNSKREEKLFNVTSTLRINTTTNEIFYCTFRRLDPEENHTAELVIPELPLAHPPNER

SEQ ID NO: 260 - protein, 220 aa, Artificial Sequence
  Synthetic Construct
FTVTVPKDLYVVEYGSNMTIECKFPVEKQLDLAALQVYWMMEDKNIIQFVHGEEDLKVQHSSYRQRARLLKDQLSLGNAALQITDVKLQDAGVYTCLISYKGADYKRITVKVNAPYNKINQRILVVDPVTSEHELTCQAEGYPKAEVIWTSSDHQVLSGKTTTTNSKREEKLFNVTSTLRINTTTNEIFYCTFRRLDPEENHTAELVIPELPLAHPPNER

SEQ ID NO: 261 - protein, 220 aa, Artificial Sequence
  Synthetic Construct
FTVTVPKDLYVVEYGSNMTIECKFPVEKQLDLAALQVYWMMEDKNIIQFVHGEEDLKVQHSSYRQRARLLKDQLSLGNAALQITDVKLQDAGVYTCLIAYGGADYKRITVKVNAPYNKINQRILVVDPVTSEHELTCQAEGYPKAEVIWTSSDHQVLSGKTTTTNSKREEKLFNVTSTLRINTTTNEIFYCTFRRLDPEENHTAELVIPELPLAHPPNER

SEQ ID NO: 262 - protein, 201 aa, Artificial Sequence
  Synthetic Construct
LFTVTVPKELYIIEHGSNVTLECNFDTGSHVNLGAIVASLQKVENDTSPHRERATLLEEQLPLGKASFHIPQVQVRDEGQYQCIIIYGVAWDYKYLTLKVKASYRKINTHILKVPETDEVELTCQATGYPLAEVSWPNVSVPANTSHSRTPEGLYQVTSVLRLKPPPGRNFSCVFWNTHVRELTLASIDLQSQMEPRTHPT

SEQ ID NO: 263 - protein, 201 aa, Artificial Sequence
  Synthetic Construct
LFTVTVPKELYIIEHGSNVTLECNFDTGSHVNLGAITAVLQKVENDTSPHRERATLLEEQLPLGKASFHIPQVQVRDEGQYQCIIIYGVAWDYKYLTLKVKASYRKINTHILKVPETDEVELTCQATGYPLAEVSWPNVSVPANTSHSRTPEGLYQVTSVLRLKPPPGRNFSCVFWNTHVRELTLASIDLQSQMEPRTHPT

SEQ ID NO: 264 - protein, 201 aa, Artificial Sequence
  Synthetic Construct
LFTVTVPKELYIIEHGSNVTLECNFDTGSHVNLGAITASLLKVENDTSPHRERATLLEEQLPLGKASFHIPQVQVRDEGQYQCIIIYGVAWDYKYLTLKVKASYRKINTHILKVPETDEVELTCQATGYPLAEVSWPNVSVPANTSHSRTPEGLYQVTSVLRLKPPPGRNFSCVFWNTHVRELTLASIDLQSQMEPRTHPT

SEQ ID NO: 265 - protein, 201 aa, Artificial Sequence
  Synthetic Construct
LFTVTVPKELYIIEHGSNVTLECNFDTGSHVNLGAIVAVLLKVENDTSPHRERATLLEEQLPLGKASFHIPQVQVRDEGQYQCIIIYGVAWDYKYLTLKVKASYRKINTHILKVPETDEVELTCQATGYPLAEVSWPNVSVPANTSHSRTPEGLYQVTSVLRLKPPPGRNFSCVFWNTHVRELTLASIDLQSQMEPRTHPT

SEQ ID NO: 266 - protein, 417 aa, Homo sapiens
MARAMAAAWPLLLVALLVLSWPPPGTGDVVVQAPTQVPGFLGDSVTLPCYLQVPNMEVTHVSQLTWARHGESGSMAVFHQTQGPSYSESKRLEFVAARLGAELRNASLRMFGLRVEDEGNYTCLFVTFPQGSRSVDIWLRVLAKPQNTAEVQKVQLTGEPVPMARCVSTGGRPPAQITWHSDLGGMPNTSQVPGFLSGTVTVTSLWILVPSSQVDGKNVTCKVEHESFEKPQLLTVNLTVYYPPEVSISGYDNNWYLGQNEATLTCDARSNPEPTGYNWSTTMGPLPPFAVAQGAQLLIRPVDKPINTTLICNVTNALGARQAELTVQVKEGPPSEHSGISRNAIIFLVLGILVFLILLGIGIYFYWSKCSREVLWHCHLCPSSTEHASASANGHVSYSAVSRENSSSQDPQTEGTR

SEQ ID NO: 267 - protein, 323 aa, Homo sapiens
WPPPGTGDVVVQAPTQVPGFLGDSVTLPCYLQVPNMEVTHVSQLTWARHGESGSMAVFHQTQGPSYSESKRLEFVAARLGAELRNASLRMFGLRVEDEGNYTCLFVTFPQGSRSVDIWLRVLAKPQNTAEVQKVQLTGEPVPMARCVSTGGRPPAQITWHSDLGGMPNTSQVPGFLSGTVTVTSLWILVPSSQVDGKNVTCKVEHESFEKPQLLTVNLTVYYPPEVSISGYDNNWYLGQNEATLTCDARSNPEPTGYNWSTTMGPLPPFAVAQGAQLLIRPVDKPINTTLICNVTNALGARQAELTVQVKEGPPSEHSGISRN

SEQ ID NO: 268 - protein, 973 aa, Artificial Sequence
  Synthetic Construct
QVQLVESGGGVVQPGRSLRLDCKASGITFSNSGMHWVRQAPGKGLEWVAVIWYDGSKRYYADSVKGRFTISRDNSKNTLFLQMNSLRAEDTAVYYCATNNDYWGQGTLVTVSSASTKGPSVFPLAPSSKSTSGGTAALGCLVKDYFPEPVTVSWNSGALTSGVHTFPAVLQSSGLYSLSSVVTVPSSSLGTQTYICNVNHKPSNTKVDKKVEPKSCDKPGSGIWELKKDVYVVELDWYPDAPGEMVVLTCDTPEEDGITWTLDQSSEVLGSGKTLTIQVKAAGDAGQYTCHKGGEVLSHSLLLLHKKEDGIWSTDILKDQKEPKNKTFLRCEAKNYSGRFTCWWLTTISTDLTFSVKSSRGSSDPQGVTCGAATLSAERVRGDNKEYEYSVECQEDSACPAAEESLPIEVMVDAVHKLKYENYTSSFFIRDIIKPDPPKNLQLKPLKNSRQVEVSWEYPDTWSTPHSYFSLTFCVQVQGKSKREKKDRVFTDKTSATVICRKNASISVRAQDRYYSSSWSEWASVPCSGGGGSGGGGSGGGGSGGGGSGRNLPVATPDPGMFPCLHHSQNLLRAVSNMLQKARQTLEFYPCTSEEIDHEDITKDKTSTVEACLPLELTKNESCLNSRETSFITNGSCLASRKTSFMMALCLSSIYEDLKMYQVEFKTMNAKLLMDPKRQIFLDQNMLAVIDELMQALNFNSETVPQKSSLEEPDFYKTKIKLCILLHAFRIRAVTIDRVMSYLNASDKTHTCPPCPAPEDEGGPSVFLFPPKPKDTLMISRTPEVTCVVVDVSHEDPEVKFNWYVDGVEVHNAKTKPREEQYNSTYRVVSVLTVLHQDWLNGKEYKCKVSNKALPAPIEKTISKAKGQPREPQVYVYPPSREEMTKNQVSLTCLVKGFYPSDIAVEWESNGQPENNYKTTPPVLDEDGSFALVSKLTVDKSRWQQGNVFSCSVMHEALHNHYTQKSLSLSPGK

SEQ ID NO: 269 - protein, 973 aa, Artificial Sequence
  Synthetic Construct
QVQLVESGGGVVQPGRSLRLDCKASGITFSNSGMHWVRQAPGKGLEWVAVIWYDGSKRYYADSVKGRFTISRDNSKNTLFLQMNSLRAEDTAVYYCATNGDYWGQGTLVTVSSASTKGPSVFPLAPSSKSTSGGTAALGCLVKDYFPEPVTVSWNSGALTSGVHTFPAVLQSSGLYSLSSVVTVPSSSLGTQTYICNVNHKPSNTKVDKKVEPKSCDKPGSGIWELKKDVYVVELDWYPDAPGEMVVLTCDTPEEDGITWTLDQSSEVLGSGKTLTIQVKAAGDAGQYTCHKGGEVLSHSLLLLHKKEDGIWSTDILKDQKEPKNKTFLRCEAKNYSGRFTCWWLTTISTDLTFSVKSSRGSSDPQGVTCGAATLSAERVRGDNKEYEYSVECQEDSACPAAEESLPIEVMVDAVHKLKYENYTSSFFIRDIIKPDPPKNLQLKPLKNSRQVEVSWEYPDTWSTPHSYFSLTFCVQVQGKSKREKKDRVFTDKTSATVICRKNASISVRAQDRYYSSSWSEWASVPCSGGGGSGGGGSGGGGSGGGGSGRNLPVATPDPGMFPCLHHSQNLLRAVSNMLQKARQTLEFYPCTSEEIDHEDITKDKTSTVEACLPLELTKNESCLNSRETSFITNGSCLASRKTSFMMALCLSSIYEDLKMYQVEFKTMNAKLLMDPKRQIFLDQNMLAVIDELMQALNFNSETVPQKSSLEEPDFYKTKIKLCILLHAFRIRAVTIDRVMSYLNASDKTHTCPPCPAPEDEGGPSVFLFPPKPKDTLMISRTPEVTCVVVDVSHEDPEVKFNWYVDGVEVHNAKTKPREEQYNSTYRVVSVLTVLHQDWLNGKEYKCKVSNKALPAPIEKTISKAKGQPREPQVYVYPPSREEMTKNQVSLTCLVKGFYPSDIAVEWESNGQPENNYKTTPPVLDEDGSFALVSKLTVDKSRWQQGNVFSCSVMHEALHNHYTQKSLSLSPGK

SEQ ID NO: 270 - protein, 973 aa, Artificial Sequence
  Synthetic Construct
QVQLVESGGGVVQPGRSLRLDCKASGITFSNSGMHWVRQAPGKGLEWVAVIWYDGSKRYYADSVKGRFTISRDNSKNTLFLQMNSLRAEDTAVYYCATNRDYWGQGTLVTVSSASTKGPSVFPLAPSSKSTSGGTAALGCLVKDYFPEPVTVSWNSGALTSGVHTFPAVLQSSGLYSLSSVVTVPSSSLGTQTYICNVNHKPSNTKVDKKVEPKSCDKPGSGIWELKKDVYVVELDWYPDAPGEMVVLTCDTPEEDGITWTLDQSSEVLGSGKTLTIQVKAAGDAGQYTCHKGGEVLSHSLLLLHKKEDGIWSTDILKDQKEPKNKTFLRCEAKNYSGRFTCWWLTTISTDLTFSVKSSRGSSDPQGVTCGAATLSAERVRGDNKEYEYSVECQEDSACPAAEESLPIEVMVDAVHKLKYENYTSSFFIRDIIKPDPPKNLQLKPLKNSRQVEVSWEYPDTWSTPHSYFSLTFCVQVQGKSKREKKDRVFTDKTSATVICRKNASISVRAQDRYYSSSWSEWASVPCSGGGGSGGGGSGGGGSGGGGSGRNLPVATPDPGMFPCLHHSQNLLRAVSNMLQKARQTLEFYPCTSEEIDHEDITKDKTSTVEACLPLELTKNESCLNSRETSFITNGSCLASRKTSFMMALCLSSIYEDLKMYQVEFKTMNAKLLMDPKRQIFLDQNMLAVIDELMQALNFNSETVPQKSSLEEPDFYKTKIKLCILLHAFRIRAVTIDRVMSYLNASDKTHTCPPCPAPEDEGGPSVFLFPPKPKDTLMISRTPEVTCVVVDVSHEDPEVKFNWYVDGVEVHNAKTKPREEQYNSTYRVVSVLTVLHQDWLNGKEYKCKVSNKALPAPIEKTISKAKGQPREPQVYVYPPSREEMTKNQVSLTCLVKGFYPSDIAVEWESNGQPENNYKTTPPVLDEDGSFALVSKLTVDKSRWQQGNVFSCSVMHEALHNHYTQKSLSLSPGK

SEQ ID NO: 271 - protein, 973 aa, Artificial Sequence
  Synthetic Construct
QVQLVESGGGVVQPGRSLRLDCKASGITFSNSGMHWVRQAPGKGLEWVAVIWYDGSKRYYADSVKGRFTISRDNSKNTLFLQMNSLRAEDTAVYYCATGDDYWGQGTLVTVSSASTKGPSVFPLAPSSKSTSGGTAALGCLVKDYFPEPVTVSWNSGALTSGVHTFPAVLQSSGLYSLSSVVTVPSSSLGTQTYICNVNHKPSNTKVDKKVEPKSCDKPGSGIWELKKDVYVVELDWYPDAPGEMVVLTCDTPEEDGITWTLDQSSEVLGSGKTLTIQVKAAGDAGQYTCHKGGEVLSHSLLLLHKKEDGIWSTDILKDQKEPKNKTFLRCEAKNYSGRFTCWWLTTISTDLTFSVKSSRGSSDPQGVTCGAATLSAERVRGDNKEYEYSVECQEDSACPAAEESLPIEVMVDAVHKLKYENYTSSFFIRDIIKPDPPKNLQLKPLKNSRQVEVSWEYPDTWSTPHSYFSLTFCVQVQGKSKREKKDRVFTDKTSATVICRKNASISVRAQDRYYSSSWSEWASVPCSGGGGSGGGGSGGGGSGGGGSGRNLPVATPDPGMFPCLHHSQNLLRAVSNMLQKARQTLEFYPCTSEEIDHEDITKDKTSTVEACLPLELTKNESCLNSRETSFITNGSCLASRKTSFMMALCLSSIYEDLKMYQVEFKTMNAKLLMDPKRQIFLDQNMLAVIDELMQALNFNSETVPQKSSLEEPDFYKTKIKLCILLHAFRIRAVTIDRVMSYLNASDKTHTCPPCPAPEDEGGPSVFLFPPKPKDTLMISRTPEVTCVVVDVSHEDPEVKFNWYVDGVEVHNAKTKPREEQYNSTYRVVSVLTVLHQDWLNGKEYKCKVSNKALPAPIEKTISKAKGQPREPQVYVYPPSREEMTKNQVSLTCLVKGFYPSDIAVEWESNGQPENNYKTTPPVLDEDGSFALVSKLTVDKSRWQQGNVFSCSVMHEALHNHYTQKSLSLSPGK

SEQ ID NO: 272 - protein, 973 aa, Artificial Sequence
  Synthetic Construct
QVQLVESGGGVVQPGRSLRLDCKASGITFSNSGMHWVRQAPGKGLEWVAVIWYDGSKRYYADSVKGRFTISRDNSKNTLFLQMNSLRAEDTAVYYCATADDYWGQGTLVTVSSASTKGPSVFPLAPSSKSTSGGTAALGCLVKDYFPEPVTVSWNSGALTSGVHTFPAVLQSSGLYSLSSVVTVPSSSLGTQTYICNVNHKPSNTKVDKKVEPKSCDKPGSGIWELKKDVYVVELDWYPDAPGEMVVLTCDTPEEDGITWTLDQSSEVLGSGKTLTIQVKAAGDAGQYTCHKGGEVLSHSLLLLHKKEDGIWSTDILKDQKEPKNKTFLRCEAKNYSGRFTCWWLTTISTDLTFSVKSSRGSSDPQGVTCGAATLSAERVRGDNKEYEYSVECQEDSACPAAEESLPIEVMVDAVHKLKYENYTSSFFIRDIIKPDPPKNLQLKPLKNSRQVEVSWEYPDTWSTPHSYFSLTFCVQVQGKSKREKKDRVFTDKTSATVICRKNASISVRAQDRYYSSSWSEWASVPCSGGGGSGGGGSGGGGSGGGGSGRNLPVATPDPGMFPCLHHSQNLLRAVSNMLQKARQTLEFYPCTSEEIDHEDITKDKTSTVEACLPLELTKNESCLNSRETSFITNGSCLASRKTSFMMALCLSSIYEDLKMYQVEFKTMNAKLLMDPKRQIFLDQNMLAVIDELMQALNFNSETVPQKSSLEEPDFYKTKIKLCILLHAFRIRAVTIDRVMSYLNASDKTHTCPPCPAPEDEGGPSVFLFPPKPKDTLMISRTPEVTCVVVDVSHEDPEVKFNWYVDGVEVHNAKTKPREEQYNSTYRVVSVLTVLHQDWLNGKEYKCKVSNKALPAPIEKTISKAKGQPREPQVYVYPPSREEMTKNQVSLTCLVKGFYPSDIAVEWESNGQPENNYKTTPPVLDEDGSFALVSKLTVDKSRWQQGNVFSCSVMHEALHNHYTQKSLSLSPGK

SEQ ID NO: 273 - protein, 973 aa, Artificial Sequence
  Synthetic Construct
QVQLVESGGGVVQPGRSLRLDCKASGITFSNSGMHWVRQAPGKGLEWVAVIWYDGSKRYYADSVKGRFTISRDNSKNTLFLQMNSLRAEDTAVYYCATMDDYWGQGTLVTVSSASTKGPSVFPLAPSSKSTSGGTAALGCLVKDYFPEPVTVSWNSGALTSGVHTFPAVLQSSGLYSLSSVVTVPSSSLGTQTYICNVNHKPSNTKVDKKVEPKSCDKPGSGIWELKKDVYVVELDWYPDAPGEMVVLTCDTPEEDGITWTLDQSSEVLGSGKTLTIQVKAAGDAGQYTCHKGGEVLSHSLLLLHKKEDGIWSTDILKDQKEPKNKTFLRCEAKNYSGRFTCWWLTTISTDLTFSVKSSRGSSDPQGVTCGAATLSAERVRGDNKEYEYSVECQEDSACPAAEESLPIEVMVDAVHKLKYENYTSSFFIRDIIKPDPPKNLQLKPLKNSRQVEVSWEYPDTWSTPHSYFSLTFCVQVQGKSKREKKDRVFTDKTSATVICRKNASISVRAQDRYYSSSWSEWASVPCSGGGGSGGGGSGGGGSGGGGSGRNLPVATPDPGMFPCLHHSQNLLRAVSNMLQKARQTLEFYPCTSEEIDHEDITKDKTSTVEACLPLELTKNESCLNSRETSFITNGSCLASRKTSFMMALCLSSIYEDLKMYQVEFKTMNAKLLMDPKRQIFLDQNMLAVIDELMQALNFNSETVPQKSSLEEPDFYKTKIKLCILLHAFRIRAVTIDRVMSYLNASDKTHTCPPCPAPEDEGGPSVFLFPPKPKDTLMISRTPEVTCVVVDVSHEDPEVKFNWYVDGVEVHNAKTKPREEQYNSTYRVVSVLTVLHQDWLNGKEYKCKVSNKALPAPIEKTISKAKGQPREPQVYVYPPSREEMTKNQVSLTCLVKGFYPSDIAVEWESNGQPENNYKTTPPVLDEDGSFALVSKLTVDKSRWQQGNVFSCSVMHEALHNHYTQKSLSLSPGK

SEQ ID NO: 274 - protein, 938 aa, Artificial Sequence
  Synthetic Construct
LFTVTVPKELYIIEHGSNVTLECNFDTGSHVNLGAITASLQKVENDTSPHRERATLLEEQLPLGKASFHIPQVQVRDEGQYQCIIIYGVAWDYKYLTLKVKASYRKINTHILKVPETDEVELTCQATGYPLAEVSWPNVSVPANTSHSRTPEGLYQVTSVLRLKPPPGRNFSCVFWNTHVRELTGSGIWELKKDVYVVELDWYPDAPGEMVVLTCDTPEEDGITWTLDQSSEVLGSGKTLTIQVKEAGDAGQYTCHKGGEVLSHSLLLLHKKEDGIWSTDILKDQKEPKNKTFLRCEAKNYSGRFTCWWLTTISTDLTFSVKSSRGSSDPQGVTCGAATLSAERVRGDNKEYEYSVECQEDSACPAAEESLPIEVMVDAVHKLKYENYTSSFFIRDIIKPDPPKNLQLKPLKNSRQVEVSWEYPDTWSTPHSYFSLTFCVQVQGKSKREKKDRVFTDKTSATVICRKNASISVRAQDRYYSSSWSEWASVPCSGGGGSGGGGSGGGGSGGGGSGRNLPVATPDPGMFPCLHHSQNLLRAVSNMLQKARQTLEFYPCTSEEIDHEDITKDKTSTVEACLPLELTKNESCLNSRETSFITNGSCLASRKTSFMMALCLSSIYEDLKMYQVEFKTMNAKLLMDPKRQIFLDQNMLAVIDELMQALNFNSETVPQKSSLEEPDFYKTKIKLCILLHAFRIRAVTIDRVMSYLNASDKTHTCPPCPAPEDEGGPSVFLFPPKPKDTLMISRTPEVTCVVVDVSHEDPEVKFNWYVDGVEVHNAKTKPREEQYNSTYRVVSVLTVLHQDWLNGKEYKCKVSNKALPAPIEKTISKAKGQPREPQVYVYPPSREEMTKNQVSLTCLVKGFYPSDIAVEWESNGQPENNYKTTPPVLDEDGSFALVSKLTVDKSRWQQGNVFSCSVMHEALHNHYTQKSLSLSPGK

SEQ ID NO: 275 - protein, 524 aa, Artificial Sequence
  Synthetic Construct
IWELKKDVYVVELDWYPDAPGEMVVLTCDTPEEDGITWTLDQSSEVLGSGKTLTIQVKEAGDAGQYTCHKGGEVLSHSLLLLHKKEDGIWSTDILKDQKEPKNKTFLRCEAKNYSGRFTCWWLTTISTDLTFSVKSSRGSSDPQGVTCGAATLSAERVRGDNKEYEYSVECQEDSACPAAEESLPIEVMVDAVHKLKYENYTSSFFIRDIIKPDPPKNLQLKPLKNSRQVEVSWEYPDTWSTPHSYFSLTFCVQVQGKSKREKKDRVFTDKTSATVICRKNASISVRAQDRYYSSSWSEWASVPCSGGGGSGGGGSGGGGSGGGGSGRNLPVATPDPGMFPCLHHSQNLLRAVSNMLQKARQTLEFYPCTSEEIDHEDITKDKTSTVEACLPLELTKNESCLNSRETSFITNGSCLASRKTSFMMALCLSSIYEDLKMYQVEFKTMNAKLLMDPKRQIFLDQNMLAVIDELMQALNFNSETVPQKSSLEEPDFYKTKIKLCILLHAFRIRAVTIDRVMSYLNAS

SEQ ID NO: 276 - protein, 953 aa, Artificial Sequence
  Synthetic Construct
LFTVTVPKELYIIEHGSNVTLECNFDTGSHVNLGAITASLQKVENDTSPHRERATLLEEQLPLGKASFHIPQVQVRDEGQYQCIIIYGVAWDYKYLTLKVKASYRKINTHILKVPETDEVELTCQATGYPLAEVSWPNVSVPANTSHSRTPEGLYQVTSVLRLKPPPGRNFSCVFWNTHVRELTGSGDKTHTCPPCPAPEDEGGPSVFLFPPKPKDTLMISRTPEVTCVVVDVSHEDPEVKFNWYVDGVEVHNAKTKPREEQYNSTYRVVSVLTVLHQDWLNGKEYKCKVSNKALPAPIEKTISKAKGQPREPQVYVYPPSREEMTKNQVSLTCLVKGFYPSDIAVEWESNGQPENNYKTTPPVLDEDGSFALVSKLTVDKSRWQQGNVFSCSVMHEALHNHYTQKSLSLSPGKGGGGSGGGGSGGGGSIWELKKDVYVVELDWYPDAPGEMVVLTCDTPEEDGITWTLDQSSEVLGSGKTLTIQVKEAGDAGQYTCHKGGEVLSHSLLLLHKKEDGIWSTDILKDQKEPKNKTFLRCEAKNYSGRFTCWWLTTISTDLTFSVKSSRGSSDPQGVTCGAATLSAERVRGDNKEYEYSVECQEDSACPAAEESLPIEVMVDAVHKLKYENYTSSFFIRDIIKPDPPKNLQLKPLKNSRQVEVSWEYPDTWSTPHSYFSLTFCVQVQGKSKREKKDRVFTDKTSATVICRKNASISVRAQDRYYSSSWSEWASVPCSGGGGSGGGGSGGGGSGGGGSGRNLPVATPDPGMFPCLHHSQNLLRAVSNMLQKARQTLEFYPCTSEEIDHEDITKDKTSTVEACLPLELTKNESCLNSRETSFITNGSCLASRKTSFMMALCLSSIYEDLKMYQVEFKTMNAKLLMDPKRQIFLDQNMLAVIDELMQALNFNSETVPQKSSLEEPDFYKTKIKLCILLHAFRIRAVTIDRVMSYLNAS

SEQ ID NO: 277 - protein, 980 aa, Artificial Sequence
  Synthetic Construct
FTVTVPKDLYVVEYGSNMTIECKFPVEKQLDLAALQVYWMMEDKNIIQFVHGEEDLKVQHSSYRQRARLLKDQLSLGNAALQITDVKLQDAGVYTCLIAYKGADYKRITVKVNAPYNKINQRILVVDPVTSEHELTCQAEGYPKAEVIWTSSDHQVLSGKTTTTNSKREEKLFNVTSTLRINTTTNEIFYCTFRRLDPEENHTAELVIPELPLAHPPNERGGGGSGGGIWELKKDVYVVELDWYPDAPGEMVVLTCDTPEEDGITWTLDQSSEVLGSGKTLTIQVKAAGDAGQYTCHKGGEVLSHSLLLLHKKEDGIWSTDILKDQKEPKNKTFLRCEAKNYSGRFTCWWLTTISTDLTFSVKSSRGSSDPQGVTCGAATLSAERVRGDNKEYEYSVECQEDSACPAAEESLPIEVMVDAVHKLKYENYTSSFFIRDIIKPDPPKNLQLKPLKNSRQVEVSWEYPDTWSTPHSYFSLTFCVQVQGKSKREKKDRVFTDKTSATVICRKNASISVRAQDRYYSSSWSEWASVPCSGGGGSGGGSGGGGSRNLPVATPDPGMFPCLHHSQNLLRAVSNMLQKARQTLEFYPCTSEEIDHEDITKDKTSTVEACLPLELTKNESCLNSRETSFITNGSCLASRKTSFMMALCLSSIYEDLKMYQVEFKTMNAKLLMDPKRQIFLDQNMLAVIDELMQALNFNSETVPQKSSLEEPDFYKTKIKLCILLHAFRIRAVTIDRVMSYLNASGGGGSGGGDKTHTCPPCPAPEDEGGPSVFLFPPKPKDTLMISRTPEVTCVVVDVSHEDPEVKFNWYVDGVEVHNAKTKPREEQYNSTYRVVSVLTVLHQDWLNGKEYKCKVSNKALPAPIEKTISKAKGQPREPQVYVYPPSREEMTKNQVSLTCLVKGFYPSDIAVEWESNGQPENNYKTTPPVLDEDGSFALVSKLTVDKSRWQQGNVFSCSVMHEALHNHYTQKSLSLSPGK

SEQ ID NO: 278 - protein, 980 aa, Artificial Sequence
  Synthetic Construct
FTVTVPKDLYVVEYGSNMTIECKFPVEKQLDLAALQVYWMMEDKNIIQFVHGEEDLKVQHSSYRQRARLLKDQLSLGNAALQITDVKLQDAGVYTCLIAYGGADYKRITVKVNAPYNKINQRILVVDPVTSEHELTCQAEGYPKAEVIWTSSDHQVLSGKTTTTNSKREEKLFNVTSTLRINTTTNEIFYCTFRRLDPEENHTAELVIPELPLAHPPNERGGGGSGGGIWELKKDVYVVELDWYPDAPGEMVVLTCDTPEEDGITWTLDQSSEVLGSGKTLTIQVKAAGDAGQYTCHKGGEVLSHSLLLLHKKEDGIWSTDILKDQKEPKNKTFLRCEAKNYSGRFTCWWLTTISTDLTFSVKSSRGSSDPQGVTCGAATLSAERVRGDNKEYEYSVECQEDSACPAAEESLPIEVMVDAVHKLKYENYTSSFFIRDIIKPDPPKNLQLKPLKNSRQVEVSWEYPDTWSTPHSYFSLTFCVQVQGKSKREKKDRVFTDKTSATVICRKNASISVRAQDRYYSSSWSEWASVPCSGGGGSGGGSGGGGSRNLPVATPDPGMFPCLHHSQNLLRAVSNMLQKARQTLEFYPCTSEEIDHEDITKDKTSTVEACLPLELTKNESCLNSRETSFITNGSCLASRKTSFMMALCLSSIYEDLKMYQVEFKTMNAKLLMDPKRQIFLDQNMLAVIDELMQALNFNSETVPQKSSLEEPDFYKTKIKLCILLHAFRIRAVTIDRVMSYLNASGGGGSGGGDKTHTCPPCPAPEDEGGPSVFLFPPKPKDTLMISRTPEVTCVVVDVSHEDPEVKFNWYVDGVEVHNAKTKPREEQYNSTYRVVSVLTVLHQDWLNGKEYKCKVSNKALPAPIEKTISKAKGQPREPQVYVYPPSREEMTKNQVSLTCLVKGFYPSDIAVEWESNGQPENNYKTTPPVLDEDGSFALVSKLTVDKSRWQQGNVFSCSVMHEALHNHYTQKSLSLSPGK

SEQ ID NO: 279 - protein, 980 aa, Artificial Sequence
  Synthetic Construct
FTVTVPKDLYVVEYGSNMTIECKFPVEKQLDLAALQVYWMMEDKNIIQFVHGEEDLKVQHSSYRQRARLLKDQLSLGNAALQITDVKLQDAGVYTCLIAYKGADYKRITVKVNAPYNKINQRILVVDPVTSEHELTCQAEGYPKAEVIWTSSDHQVLSGKTTTTNSKREEKLFNVTSTLRINTTTNEIFYCTFRRLDPEENHTAELVIPELPLAHPPNERGGGGSGGGDKTHTCPPCPAPEDEGGPSVFLFPPKPKDTLMISRTPEVTCVVVDVSHEDPEVKFNWYVDGVEVHNAKTKPREEQYNSTYRVVSVLTVLHQDWLNGKEYKCKVSNKALPAPIEKTISKAKGQPREPQVYVYPPSREEMTKNQVSLTCLVKGFYPSDIAVEWESNGQPENNYKTTPPVLDEDGSFALVSKLTVDKSRWQQGNVFSCSVMHEALHNHYTQKSLSLSPGKGGGGSGGGIWELKKDVYVVELDWYPDAPGEMVVLTCDTPEEDGITWTLDQSSEVLGSGKTLTIQVKAAGDAGQYTCHKGGEVLSHSLLLLHKKEDGIWSTDILKDQKEPKNKTFLRCEAKNYSGRFTCWWLTTISTDLTFSVKSSRGSSDPQGVTCGAATLSAERVRGDNKEYEYSVECQEDSACPAAEESLPIEVMVDAVHKLKYENYTSSFFIRDIIKPDPPKNLQLKPLKNSRQVEVSWEYPDTWSTPHSYFSLTFCVQVQGKSKREKKDRVFTDKTSATVICRKNASISVRAQDRYYSSSWSEWASVPCSGGGGSGGGSGGGGSRNLPVATPDPGMFPCLHHSQNLLRAVSNMLQKARQTLEFYPCTSEEIDHEDITKDKTSTVEACLPLELTKNESCLNSRETSFITNGSCLASRKTSFMMALCLSSIYEDLKMYQVEFKTMNAKLLMDPKRQIFLDQNMLAVIDELMQALNFNSETVPQKSSLEEPDFYKTKIKLCILLHAFRIRAVTIDRVMSYLNAS

SEQ ID NO: 280 - protein, 980 aa, Artificial Sequence
  Synthetic Construct
FTVTVPKDLYVVEYGSNMTIECKFPVEKQLDLAALQVYWMMEDKNIIQFVHGEEDLKVQHSSYRQRARLLKDQLSLGNAALQITDVKLQDAGVYTCLIAYGGADYKRITVKVNAPYNKINQRILVVDPVTSEHELTCQAEGYPKAEVIWTSSDHQVLSGKTTTTNSKREEKLFNVTSTLRINTTTNEIFYCTFRRLDPEENHTAELVIPELPLAHPPNERGGGGSGGGDKTHTCPPCPAPEDEGGPSVFLFPPKPKDTLMISRTPEVTCVVVDVSHEDPEVKFNWYVDGVEVHNAKTKPREEQYNSTYRVVSVLTVLHQDWLNGKEYKCKVSNKALPAPIEKTISKAKGQPREPQVYVYPPSREEMTKNQVSLTCLVKGFYPSDIAVEWESNGQPENNYKTTPPVLDEDGSFALVSKLTVDKSRWQQGNVFSCSVMHEALHNHYTQKSLSLSPGKGGGGSGGGIWELKKDVYVVELDWYPDAPGEMVVLTCDTPEEDGITWTLDQSSEVLGSGKTLTIQVKAAGDAGQYTCHKGGEVLSHSLLLLHKKEDGIWSTDILKDQKEPKNKTFLRCEAKNYSGRFTCWWLTTISTDLTFSVKSSRGSSDPQGVTCGAATLSAERVRGDNKEYEYSVECQEDSACPAAEESLPIEVMVDAVHKLKYENYTSSFFIRDIIKPDPPKNLQLKPLKNSRQVEVSWEYPDTWSTPHSYFSLTFCVQVQGKSKREKKDRVFTDKTSATVICRKNASISVRAQDRYYSSSWSEWASVPCSGGGGSGGGSGGGGSRNLPVATPDPGMFPCLHHSQNLLRAVSNMLQKARQTLEFYPCTSEEIDHEDITKDKTSTVEACLPLELTKNESCLNSRETSFITNGSCLASRKTSFMMALCLSSIYEDLKMYQVEFKTMNAKLLMDPKRQIFLDQNMLAVIDELMQALNFNSETVPQKSSLEEPDFYKTKIKLCILLHAFRIRAVTIDRVMSYLNAS

SEQ ID NO: 281 - protein, 455 aa, Artificial Sequence
  Synthetic Construct
FTVTVPKDLYVVEYGSNMTIECKFPVEKQLDLAALQVYWMMEDKNIIQFVHGEEDLKVQHSSYRQRARLLKDQLSLGNAALQITDVKLQDAGVYTCLIAYKGADYKRITVKVNAPYNKINQRILVVDPVTSEHELTCQAEGYPKAEVIWTSSDHQVLSGKTTTTNSKREEKLFNVTSTLRINTTTNEIFYCTFRRLDPEENHTAELVIPELPLAHPPNERGGGGSGGGDKTHTCPPCPAPEDEGGPSVFLFPPKPKDTLMISRTPEVTCVVVDVSHEDPEVKFNWYVDGVEVHNAKTKPREEQYNSTYRVVSVLTVLHQDWLNGKEYKCKVSNKALPAPIEKTISKAKGQPREPQVYVYPPSREEMTKNQVSLTCLVKGFYPSDIAVEWESNGQPENNYKTTPPVLDEDGSFALVSKLTVDKSRWQQGNVFSCSVMHEALHNHYTQKSLSLSPGK

SEQ ID NO: 282 - protein, 455 aa, Artificial Sequence
  Synthetic Construct
FTVTVPKDLYVVEYGSNMTIECKFPVEKQLDLAALQVYWMMEDKNIIQFVHGEEDLKVQHSSYRQRARLLKDQLSLGNAALQITDVKLQDAGVYTCLIAYGGADYKRITVKVNAPYNKINQRILVVDPVTSEHELTCQAEGYPKAEVIWTSSDHQVLSGKTTTTNSKREEKLFNVTSTLRINTTTNEIFYCTFRRLDPEENHTAELVIPELPLAHPPNERGGGGSGGGDKTHTCPPCPAPEDEGGPSVFLFPPKPKDTLMISRTPEVTCVVVDVSHEDPEVKFNWYVDGVEVHNAKTKPREEQYNSTYRVVSVLTVLHQDWLNGKEYKCKVSNKALPAPIEKTISKAKGQPREPQVYVYPPSREEMTKNQVSLTCLVKGFYPSDIAVEWESNGQPENNYKTTPPVLDEDGSFALVSKLTVDKSRWQQGNVFSCSVMHEALHNHYTQKSLSLSPGK

SEQ ID NO: 283 - protein, 455 aa, Artificial Sequence
  Synthetic Construct
FTVTVPKDLYVVEYGSNMTIECKFPVEKQLDLAALQVYWMMEDKNIIQFVHGEEDLKVQHSSYRQRARLLKDQLSLGNAALQITDVKLQDAGVYTCLIAYKGADYKRITVKVNAPYNKINQRILVVDPVTSEHELTCQAEGYPKAEVIWTSSDHQVLSGKTTTTNSKREEKLFNVTSTLRINTTTNEIFYCTFRRLDPEENHTAELVIPELPLAHPPNERGGGGSGGGDKTHTCPPCPAPEKKGGPSVFLFPPKPKDTLMISRTPEVTCVVVDVSHEDPEVKFNWYVDGVEVHNAKTKPREEQYNSTYRVVSVLTVLHQDWLNGKEYKCKVSNKALPAPIEKTISKAKGQPREPQVYVLPPSREEMTKNQVSLLCLVKGFYPSDIAVEWESNGQPENRYMTWPPVLDSDGSFFLYSKLTVDKSRWQQGNVFSCSVMHEALHNHYTQKSLSLSPGK

SEQ ID NO: 284 - protein, 455 aa, Artificial Sequence
  Synthetic Construct
FTVTVPKDLYVVEYGSNMTIECKFPVEKQLDLAALQVYWMMEDKNIIQFVHGEEDLKVQHSSYRQRARLLKDQLSLGNAALQITDVKLQDAGVYTCLIAYGGADYKRITVKVNAPYNKINQRILVVDPVTSEHELTCQAEGYPKAEVIWTSSDHQVLSGKTTTTNSKREEKLFNVTSTLRINTTTNEIFYCTFRRLDPEENHTAELVIPELPLAHPPNERGGGGSGGGDKTHTCPPCPAPEKKGGPSVFLFPPKPKDTLMISRTPEVTCVVVDVSHEDPEVKFNWYVDGVEVHNAKTKPREEQYNSTYRVVSVLTVLHQDWLNGKEYKCKVSNKALPAPIEKTISKAKGQPREPQVYVLPPSREEMTKNQVSLLCLVKGFYPSDIAVEWESNGQPENRYMTWPPVLDSDGSFFLYSKLTVDKSRWQQGNVFSCSVMHEALHNHYTQKSLSLSPGK

SEQ ID NO: 285 - protein, 593 aa, Artificial Sequence
  Synthetic Construct
FTVTVPKDLYVVEYGSNMTIECKFPVEKQLDLAALQVYWMMEDKNIIQFVHGEEDLKVQHSSYRQRARLLKDQLSLGNAALQITDVKLQDAGVYTCLIAYKGADYKRITVKVNAPYNKINQRILVVDPVTSEHELTCQAEGYPKAEVIWTSSDHQVLSGKTTTTNSKREEKLFNVTSTLRINTTTNEIFYCTFRRLDPEENHTAELVIPELPLAHPPNERGGGSGAPTSSSTKKTQLQLEHLRLDLEMILNGINNYKNPKLTDMLTFEFYMPKKATELKHLQCLERELKPLEEVLNLAQSKNFHLRPRDLISNINVIVLELKGSETTFMCEYADETATIVEFLNRWITFCQSIISTLTGGGGSGGGDKTHTCPPCPAPEKKGGPSVFLFPPKPKDTLMISRTPEVTCVVVDVSHEDPEVKFNWYVDGVEVHNAKTKPREEQYNSTYRVVSVLTVLHQDWLNGKEYKCKVSNKALPAPIEKTISKAKGQPREPQVYVLPPSREEMTKNQVSLLCLVKGFYPSDIAVEWESNGQPENRYMTWPPVLDSDGSFFLYSKLTVDKSRWQQGNVFSCSVMHEALHNHYTQKSLSLSPGK

SEQ ID NO: 286 - protein, 593 aa, Artificial Sequence
  Synthetic Construct
FTVTVPKDLYVVEYGSNMTIECKFPVEKQLDLAALQVYWMMEDKNIIQFVHGEEDLKVQHSSYRQRARLLKDQLSLGNAALQITDVKLQDAGVYTCLIAYKGADYKRITVKVNAPYNKINQRILVVDPVTSEHELTCQAEGYPKAEVIWTSSDHQVLSGKTTTTNSKREEKLFNVTSTLRINTTTNEIFYCTFRRLDPEENHTAELVIPELPLAHPPNERGGGSGAPTSSSTKKTQLQLEHLLLDLQMILNGINNYKNPKLTDMLTFEFYMPKKATELKHLQCLERELKPLEEVLNLAQSKNFHLRPRDLISNINVIVLELKGSETTFMCEYADETATIVEFLNRWITFCTSIISTLTGGGGSGGGDKTHTCPPCPAPEKKGGPSVFLFPPKPKDTLMISRTPEVTCVVVDVSHEDPEVKFNWYVDGVEVHNAKTKPREEQYNSTYRVVSVLTVLHQDWLNGKEYKCKVSNKALPAPIEKTISKAKGQPREPQVYVLPPSREEMTKNQVSLLCLVKGFYPSDIAVEWESNGQPENRYMTWPPVLDSDGSFFLYSKLTVDKSRWQQGNVFSCSVMHEALHNHYTQKSLSLSPGK

SEQ ID NO: 287 - protein, 593 aa, Artificial Sequence
  Synthetic Construct
FTVTVPKDLYVVEYGSNMTIECKFPVEKQLDLAALQVYWMMEDKNIIQFVHGEEDLKVQHSSYRQRARLLKDQLSLGNAALQITDVKLQDAGVYTCLIAYKGADYKRITVKVNAPYNKINQRILVVDPVTSEHELTCQAEGYPKAEVIWTSSDHQVLSGKTTTTNSKREEKLFNVTSTLRINTTTNEIFYCTFRRLDPEENHTAELVIPELPLAHPPNERGGGSGAPTSSSTKKTQLQLEHLRLDLEMILNGINNYKNPKLTDMLTFEFYMPKKATELKHLQCLERELKPLEEVLNLAQSKNFHLRPRDLISNINVIVLELKGSETTFMCEYADETATIVEFLNRWITFCTSIISTLTGGGGSGGGDKTHTCPPCPAPEKKGGPSVFLFPPKPKDTLMISRTPEVTCVVVDVSHEDPEVKFNWYVDGVEVHNAKTKPREEQYNSTYRVVSVLTVLHQDWLNGKEYKCKVSNKALPAPIEKTISKAKGQPREPQVYVLPPSREEMTKNQVSLLCLVKGFYPSDIAVEWESNGQPENRYMTWPPVLDSDGSFFLYSKLTVDKSRWQQGNVFSCSVMHEALHNHYTQKSLSLSPGK

SEQ ID NO: 288 - protein, 593 aa, Artificial Sequence
  Synthetic Construct
FTVTVPKDLYVVEYGSNMTIECKFPVEKQLDLAALQVYWMMEDKNIIQFVHGEEDLKVQHSSYRQRARLLKDQLSLGNAALQITDVKLQDAGVYTCLIAYKGADYKRITVKVNAPYNKINQRILVVDPVTSEHELTCQAEGYPKAEVIWTSSDHQVLSGKTTTTNSKREEKLFNVTSTLRINTTTNEIFYCTFRRLDPEENHTAELVIPELPLAHPPNERGGGSGAPTSSSTKKTQLQLEHLRLDLEMILNGINNYKNPKLTDMLTFEFYMPKKATELKHLQCLERELKPLEEVLNLAQSKNFHLRPRDLISNINVIVLELKGSETTFMCEYADETATIVEFLNRWITFCTSIIRTLTGGGGSGGGDKTHTCPPCPAPEKKGGPSVFLFPPKPKDTLMISRTPEVTCVVVDVSHEDPEVKFNWYVDGVEVHNAKTKPREEQYNSTYRVVSVLTVLHQDWLNGKEYKCKVSNKALPAPIEKTISKAKGQPREPQVYVLPPSREEMTKNQVSLLCLVKGFYPSDIAVEWESNGQPENRYMTWPPVLDSDGSFFLYSKLTVDKSRWQQGNVFSCSVMHEALHNHYTQKSLSLSPGK

SEQ ID NO: 289 - protein, 593 aa, Artificial Sequence
  Synthetic Construct
FTVTVPKDLYVVEYGSNMTIECKFPVEKQLDLAALQVYWMMEDKNIIQFVHGEEDLKVQHSSYRQRARLLKDQLSLGNAALQITDVKLQDAGVYTCLIAYGGADYKRITVKVNAPYNKINQRILVVDPVTSEHELTCQAEGYPKAEVIWTSSDHQVLSGKTTTTNSKREEKLFNVTSTLRINTTTNEIFYCTFRRLDPEENHTAELVIPELPLAHPPNERGGGSGAPTSSSTKKTQLQLEHLRLDLEMILNGINNYKNPKLTDMLTFEFYMPKKATELKHLQCLERELKPLEEVLNLAQSKNFHLRPRDLISNINVIVLELKGSETTFMCEYADETATIVEFLNRWITFCQSIISTLTGGGGSGGGDKTHTCPPCPAPEKKGGPSVFLFPPKPKDTLMISRTPEVTCVVVDVSHEDPEVKFNWYVDGVEVHNAKTKPREEQYNSTYRVVSVLTVLHQDWLNGKEYKCKVSNKALPAPIEKTISKAKGQPREPQVYVLPPSREEMTKNQVSLLCLVKGFYPSDIAVEWESNGQPENRYMTWPPVLDSDGSFFLYSKLTVDKSRWQQGNVFSCSVMHEALHNHYTQKSLSLSPGK

SEQ ID NO: 290 - protein, 593 aa, Artificial Sequence
  Synthetic Construct
FTVTVPKDLYVVEYGSNMTIECKFPVEKQLDLAALQVYWMMEDKNIIQFVHGEEDLKVQHSSYRQRARLLKDQLSLGNAALQITDVKLQDAGVYTCLIAYGGADYKRITVKVNAPYNKINQRILVVDPVTSEHELTCQAEGYPKAEVIWTSSDHQVLSGKTTTTNSKREEKLFNVTSTLRINTTTNEIFYCTFRRLDPEENHTAELVIPELPLAHPPNERGGGSGAPTSSSTKKTQLQLEHLLLDLQMILNGINNYKNPKLTDMLTFEFYMPKKATELKHLQCLERELKPLEEVLNLAQSKNFHLRPRDLISNINVIVLELKGSETTFMCEYADETATIVEFLNRWITFCTSIISTLTGGGGSGGGDKTHTCPPCPAPEKKGGPSVFLFPPKPKDTLMISRTPEVTCVVVDVSHEDPEVKFNWYVDGVEVHNAKTKPREEQYNSTYRVVSVLTVLHQDWLNGKEYKCKVSNKALPAPIEKTISKAKGQPREPQVYVLPPSREEMTKNQVSLLCLVKGFYPSDIAVEWESNGQPENRYMTWPPVLDSDGSFFLYSKLTVDKSRWQQGNVFSCSVMHEALHNHYTQKSLSLSPGK

SEQ ID NO: 291 - protein, 593 aa, Artificial Sequence
  Synthetic Construct
FTVTVPKDLYVVEYGSNMTIECKFPVEKQLDLAALQVYWMMEDKNIIQFVHGEEDLKVQHSSYRQRARLLKDQLSLGNAALQITDVKLQDAGVYTCLIAYGGADYKRITVKVNAPYNKINQRILVVDPVTSEHELTCQAEGYPKAEVIWTSSDHQVLSGKTTTTNSKREEKLFNVTSTLRINTTTNEIFYCTFRRLDPEENHTAELVIPELPLAHPPNERGGGSGAPTSSSTKKTQLQLEHLRLDLEMILNGINNYKNPKLTDMLTFEFYMPKKATELKHLQCLERELKPLEEVLNLAQSKNFHLRPRDLISNINVIVLELKGSETTFMCEYADETATIVEFLNRWITFCTSIISTLTGGGGSGGGDKTHTCPPCPAPEKKGGPSVFLFPPKPKDTLMISRTPEVTCVVVDVSHEDPEVKFNWYVDGVEVHNAKTKPREEQYNSTYRVVSVLTVLHQDWLNGKEYKCKVSNKALPAPIEKTISKAKGQPREPQVYVLPPSREEMTKNQVSLLCLVKGFYPSDIAVEWESNGQPENRYMTWPPVLDSDGSFFLYSKLTVDKSRWQQGNVFSCSVMHEALHNHYTQKSLSLSPGK

SEQ ID NO: 292 - protein, 593 aa, Artificial Sequence
  Synthetic Construct
FTVTVPKDLYVVEYGSNMTIECKFPVEKQLDLAALQVYWMMEDKNIIQFVHGEEDLKVQHSSYRQRARLLKDQLSLGNAALQITDVKLQDAGVYTCLIAYGGADYKRITVKVNAPYNKINQRILVVDPVTSEHELTCQAEGYPKAEVIWTSSDHQVLSGKTTTTNSKREEKLFNVTSTLRINTTTNEIFYCTFRRLDPEENHTAELVIPELPLAHPPNERGGGSGAPTSSSTKKTQLQLEHLRLDLEMILNGINNYKNPKLTDMLTFEFYMPKKATELKHLQCLERELKPLEEVLNLAQSKNFHLRPRDLISNINVIVLELKGSETTFMCEYADETATIVEFLNRWITFCTSIIRTLTGGGGSGGGDKTHTCPPCPAPEKKGGPSVFLFPPKPKDTLMISRTPEVTCVVVDVSHEDPEVKFNWYVDGVEVHNAKTKPREEQYNSTYRVVSVLTVLHQDWLNGKEYKCKVSNKALPAPIEKTISKAKGQPREPQVYVLPPSREEMTKNQVSLLCLVKGFYPSDIAVEWESNGQPENRYMTWPPVLDSDGSFFLYSKLTVDKSRWQQGNVFSCSVMHEALHNHYTQKSLSLSPGK

SEQ ID NO: 293 - protein, 961 aa, Artificial Sequence
  Synthetic Construct
LFTVTVPKELYIIEHGSNVTLECNFDTGSHVNLGAITAVLQKVENDTSPHRERATLLEEQLPLGKASFHIPQVQVRDEGQYQCIIIYGVAWDYKYLTLKVKASYRKINTHILKVPETDEVELTCQATGYPLAEVSWPNVSVPANTSHSRTPEGLYQVTSVLRLKPPPGRNFSCVFWNTHVRELTLASIDLQSQMEPRTHPTGGGGSGGGIWELKKDVYVVELDWYPDAPGEMVVLTCDTPEEDGITWTLDQSSEVLGSGKTLTIQVKAAGDAGQYTCHKGGEVLSHSLLLLHKKEDGIWSTDILKDQKEPKNKTFLRCEAKNYSGRFTCWWLTTISTDLTFSVKSSRGSSDPQGVTCGAATLSAERVRGDNKEYEYSVECQEDSACPAAEESLPIEVMVDAVHKLKYENYTSSFFIRDIIKPDPPKNLQLKPLKNSRQVEVSWEYPDTWSTPHSYFSLTFCVQVQGKSKREKKDRVFTDKTSATVICRKNASISVRAQDRYYSSSWSEWASVPCSGGGGSGGGSGGGGSRNLPVATPDPGMFPCLHHSQNLLRAVSNMLQKARQTLEFYPCTSEEIDHEDITKDKTSTVEACLPLELTKNESCLNSRETSFITNGSCLASRKTSFMMALCLSSIYEDLKMYQVEFKTMNAKLLMDPKRQIFLDQNMLAVIDELMQALNFNSETVPQKSSLEEPDFYKTKIKLCILLHAFRIRAVTIDRVMSYLNASGGGGSGGGDKTHTCPPCPAPEDEGGPSVFLFPPKPKDTLMISRTPEVTCVVVDVSHEDPEVKFNWYVDGVEVHNAKTKPREEQYNSTYRVVSVLTVLHQDWLNGKEYKCKVSNKALPAPIEKTISKAKGQPREPQVYVYPPSREEMTKNQVSLTCLVKGFYPSDIAVEWESNGQPENNYKTTPPVLDEDGSFALVSKLTVDKSRWQQGNVFSCSVMHEALHNHYTQKSLSLSPGK

SEQ ID NO: 294 - protein, 961 aa, Artificial Sequence
  Synthetic Construct
LFTVTVPKELYIIEHGSNVTLECNFDTGSHVNLGAIVAVLLKVENDTSPHRERATLLEEQLPLGKASFHIPQVQVRDEGQYQCIIIYGVAWDYKYLTLKVKASYRKINTHILKVPETDEVELTCQATGYPLAEVSWPNVSVPANTSHSRTPEGLYQVTSVLRLKPPPGRNFSCVFWNTHVRELTLASIDLQSQMEPRTHPTGGGGSGGGIWELKKDVYVVELDWYPDAPGEMVVLTCDTPEEDGITWTLDQSSEVLGSGKTLTIQVKAAGDAGQYTCHKGGEVLSHSLLLLHKKEDGIWSTDILKDQKEPKNKTFLRCEAKNYSGRFTCWWLTTISTDLTFSVKSSRGSSDPQGVTCGAATLSAERVRGDNKEYEYSVECQEDSACPAAEESLPIEVMVDAVHKLKYENYTSSFFIRDIIKPDPPKNLQLKPLKNSRQVEVSWEYPDTWSTPHSYFSLTFCVQVQGKSKREKKDRVFTDKTSATVICRKNASISVRAQDRYYSSSWSEWASVPCSGGGGSGGGSGGGGSRNLPVATPDPGMFPCLHHSQNLLRAVSNMLQKARQTLEFYPCTSEEIDHEDITKDKTSTVEACLPLELTKNESCLNSRETSFITNGSCLASRKTSFMMALCLSSIYEDLKMYQVEFKTMNAKLLMDPKRQIFLDQNMLAVIDELMQALNFNSETVPQKSSLEEPDFYKTKIKLCILLHAFRIRAVTIDRVMSYLNASGGGGSGGGDKTHTCPPCPAPEDEGGPSVFLFPPKPKDTLMISRTPEVTCVVVDVSHEDPEVKFNWYVDGVEVHNAKTKPREEQYNSTYRVVSVLTVLHQDWLNGKEYKCKVSNKALPAPIEKTISKAKGQPREPQVYVYPPSREEMTKNQVSLTCLVKGFYPSDIAVEWESNGQPENNYKTTPPVLDEDGSFALVSKLTVDKSRWQQGNVFSCSVMHEALHNHYTQKSLSLSPGK

SEQ ID NO: 295 - protein, 961 aa, Artificial Sequence
  Synthetic Construct
LFTVTVPKELYIIEHGSNVTLECNFDTGSHVNLGAITAVLQKVENDTSPHRERATLLEEQLPLGKASFHIPQVQVRDEGQYQCIIIYGVAWDYKYLTLKVKASYRKINTHILKVPETDEVELTCQATGYPLAEVSWPNVSVPANTSHSRTPEGLYQVTSVLRLKPPPGRNFSCVFWNTHVRELTLASIDLQSQMEPRTHPTGGGGSGGGDKTHTCPPCPAPEDEGGPSVFLFPPKPKDTLMISRTPEVTCVVVDVSHEDPEVKFNWYVDGVEVHNAKTKPREEQYNSTYRVVSVLTVLHQDWLNGKEYKCKVSNKALPAPIEKTISKAKGQPREPQVYVYPPSREEMTKNQVSLTCLVKGFYPSDIAVEWESNGQPENNYKTTPPVLDEDGSFALVSKLTVDKSRWQQGNVFSCSVMHEALHNHYTQKSLSLSPGKGGGGSGGGIWELKKDVYVVELDWYPDAPGEMVVLTCDTPEEDGITWTLDQSSEVLGSGKTLTIQVKAAGDAGQYTCHKGGEVLSHSLLLLHKKEDGIWSTDILKDQKEPKNKTFLRCEAKNYSGRFTCWWLTTISTDLTFSVKSSRGSSDPQGVTCGAATLSAERVRGDNKEYEYSVECQEDSACPAAEESLPIEVMVDAVHKLKYENYTSSFFIRDIIKPDPPKNLQLKPLKNSRQVEVSWEYPDTWSTPHSYFSLTFCVQVQGKSKREKKDRVFTDKTSATVICRKNASISVRAQDRYYSSSWSEWASVPCSGGGGSGGGSGGGGSRNLPVATPDPGMFPCLHHSQNLLRAVSNMLQKARQTLEFYPCTSEEIDHEDITKDKTSTVEACLPLELTKNESCLNSRETSFITNGSCLASRKTSFMMALCLSSIYEDLKMYQVEFKTMNAKLLMDPKRQIFLDQNMLAVIDELMQALNFNSETVPQKSSLEEPDFYKTKIKLCILLHAFRIRAVTIDRVMSYLNAS

SEQ ID NO: 296 - protein, 961 aa, Artificial Sequence
  Synthetic Construct
LFTVTVPKELYIIEHGSNVTLECNFDTGSHVNLGAIVAVLLKVENDTSPHRERATLLEEQLPLGKASFHIPQVQVRDEGQYQCIIIYGVAWDYKYLTLKVKASYRKINTHILKVPETDEVELTCQATGYPLAEVSWPNVSVPANTSHSRTPEGLYQVTSVLRLKPPPGRNFSCVFWNTHVRELTLASIDLQSQMEPRTHPTGGGGSGGGDKTHTCPPCPAPEDEGGPSVFLFPPKPKDTLMISRTPEVTCVVVDVSHEDPEVKFNWYVDGVEVHNAKTKPREEQYNSTYRVVSVLTVLHQDWLNGKEYKCKVSNKALPAPIEKTISKAKGQPREPQVYVYPPSREEMTKNQVSLTCLVKGFYPSDIAVEWESNGQPENNYKTTPPVLDEDGSFALVSKLTVDKSRWQQGNVFSCSVMHEALHNHYTQKSLSLSPGKGGGGSGGGIWELKKDVYVVELDWYPDAPGEMVVLTCDTPEEDGITWTLDQSSEVLGSGKTLTIQVKAAGDAGQYTCHKGGEVLSHSLLLLHKKEDGIWSTDILKDQKEPKNKTFLRCEAKNYSGRFTCWWLTTISTDLTFSVKSSRGSSDPQGVTCGAATLSAERVRGDNKEYEYSVECQEDSACPAAEESLPIEVMVDAVHKLKYENYTSSFFIRDIIKPDPPKNLQLKPLKNSRQVEVSWEYPDTWSTPHSYFSLTFCVQVQGKSKREKKDRVFTDKTSATVICRKNASISVRAQDRYYSSSWSEWASVPCSGGGGSGGGSGGGGSRNLPVATPDPGMFPCLHHSQNLLRAVSNMLQKARQTLEFYPCTSEEIDHEDITKDKTSTVEACLPLELTKNESCLNSRETSFITNGSCLASRKTSFMMALCLSSIYEDLKMYQVEFKTMNAKLLMDPKRQIFLDQNMLAVIDELMQALNFNSETVPQKSSLEEPDFYKTKIKLCILLHAFRIRAVTIDRVMSYLNAS

SEQ ID NO: 297 - protein, 436 aa, Artificial Sequence
  Synthetic Construct
LFTVTVPKELYIIEHGSNVTLECNFDTGSHVNLGAITAVLQKVENDTSPHRERATLLEEQLPLGKASFHIPQVQVRDEGQYQCIIIYGVAWDYKYLTLKVKASYRKINTHILKVPETDEVELTCQATGYPLAEVSWPNVSVPANTSHSRTPEGLYQVTSVLRLKPPPGRNFSCVFWNTHVRELTLASIDLQSQMEPRTHPTGGGGSGGGDKTHTCPPCPAPEDEGGPSVFLFPPKPKDTLMISRTPEVTCVVVDVSHEDPEVKFNWYVDGVEVHNAKTKPREEQYNSTYRVVSVLTVLHQDWLNGKEYKCKVSNKALPAPIEKTISKAKGQPREPQVYVYPPSREEMTKNQVSLTCLVKGFYPSDIAVEWESNGQPENNYKTTPPVLDEDGSFALVSKLTVDKSRWQQGNVFSCSVMHEALHNHYTQKSLSLSPGK

SEQ ID NO: 298 - protein, 436 aa, Artificial Sequence
  Synthetic Construct
LFTVTVPKELYIIEHGSNVTLECNFDTGSHVNLGAIVAVLLKVENDTSPHRERATLLEEQLPLGKASFHIPQVQVRDEGQYQCIIIYGVAWDYKYLTLKVKASYRKINTHILKVPETDEVELTCQATGYPLAEVSWPNVSVPANTSHSRTPEGLYQVTSVLRLKPPPGRNFSCVFWNTHVRELTLASIDLQSQMEPRTHPTGGGGSGGGDKTHTCPPCPAPEDEGGPSVFLFPPKPKDTLMISRTPEVTCVVVDVSHEDPEVKFNWYVDGVEVHNAKTKPREEQYNSTYRVVSVLTVLHQDWLNGKEYKCKVSNKALPAPIEKTISKAKGQPREPQVYVYPPSREEMTKNQVSLTCLVKGFYPSDIAVEWESNGQPENNYKTTPPVLDEDGSFALVSKLTVDKSRWQQGNVFSCSVMHEALHNHYTQKSLSLSPGK

SEQ ID NO: 299 - protein, 436 aa, Artificial Sequence
  Synthetic Construct
LFTVTVPKELYIIEHGSNVTLECNFDTGSHVNLGAITAVLQKVENDTSPHRERATLLEEQLPLGKASFHIPQVQVRDEGQYQCIIIYGVAWDYKYLTLKVKASYRKINTHILKVPETDEVELTCQATGYPLAEVSWPNVSVPANTSHSRTPEGLYQVTSVLRLKPPPGRNFSCVFWNTHVRELTLASIDLQSQMEPRTHPTGGGGSGGGDKTHTCPPCPAPEKKGGPSVFLFPPKPKDTLMISRTPEVTCVVVDVSHEDPEVKFNWYVDGVEVHNAKTKPREEQYNSTYRVVSVLTVLHQDWLNGKEYKCKVSNKALPAPIEKTISKAKGQPREPQVYVLPPSREEMTKNQVSLLCLVKGFYPSDIAVEWESNGQPENRYMTWPPVLDSDGSFFLYSKLTVDKSRWQQGNVFSCSVMHEALHNHYTQKSLSLSPGK

SEQ ID NO: 300 - protein, 436 aa, Artificial Sequence
  Synthetic Construct
LFTVTVPKELYIIEHGSNVTLECNFDTGSHVNLGAIVAVLLKVENDTSPHRERATLLEEQLPLGKASFHIPQVQVRDEGQYQCIIIYGVAWDYKYLTLKVKASYRKINTHILKVPETDEVELTCQATGYPLAEVSWPNVSVPANTSHSRTPEGLYQVTSVLRLKPPPGRNFSCVFWNTHVRELTLASIDLQSQMEPRTHPTGGGGSGGGDKTHTCPPCPAPEKKGGPSVFLFPPKPKDTLMISRTPEVTCVVVDVSHEDPEVKFNWYVDGVEVHNAKTKPREEQYNSTYRVVSVLTVLHQDWLNGKEYKCKVSNKALPAPIEKTISKAKGQPREPQVYVLPPSREEMTKNQVSLLCLVKGFYPSDIAVEWESNGQPENRYMTWPPVLDSDGSFFLYSKLTVDKSRWQQGNVFSCSVMHEALHNHYTQKSLSLSPGK

SEQ ID NO: 301 - protein, 574 aa, Artificial Sequence
  Synthetic Construct
LFTVTVPKELYIIEHGSNVTLECNFDTGSHVNLGAITAVLQKVENDTSPHRERATLLEEQLPLGKASFHIPQVQVRDEGQYQCIIIYGVAWDYKYLTLKVKASYRKINTHILKVPETDEVELTCQATGYPLAEVSWPNVSVPANTSHSRTPEGLYQVTSVLRLKPPPGRNFSCVFWNTHVRELTLASIDLQSQMEPRTHPTGGGSGAPTSSSTKKTQLQLEHLRLDLEMILNGINNYKNPKLTDMLTFEFYMPKKATELKHLQCLERELKPLEEVLNLAQSKNFHLRPRDLISNINVIVLELKGSETTFMCEYADETATIVEFLNRWITFCQSIISTLTGGGGSGGGDKTHTCPPCPAPEKKGGPSVFLFPPKPKDTLMISRTPEVTCVVVDVSHEDPEVKFNWYVDGVEVHNAKTKPREEQYNSTYRVVSVLTVLHQDWLNGKEYKCKVSNKALPAPIEKTISKAKGQPREPQVYVLPPSREEMTKNQVSLLCLVKGFYPSDIAVEWESNGQPENRYMTWPPVLDSDGSFFLYSKLTVDKSRWQQGNVFSCSVMHEALHNHYTQKSLSLSPGK

SEQ ID NO: 302 - protein, 573 aa, Artificial Sequence
  Synthetic Construct
LFTVTVPKELYIIEHGSNVTLECNFDTGSHVNLGAITAVLQKVENDTSPHRERATLLEEQLPLGKASFHIPQVQVRDEGQYQCIIIYGVAWDYKYLTLKVKASYRKINTHILKVPETDEVELTCQATGYPLAEVSWPNVSVPANTSHSRTPEGLYQVTSLRLKPPPGRNFSCVFWNTHVRELTLASIDLQSQMEPRTHPTGGGSGAPTSSSTKKTQLQLEHLLLDLQMILNGINNYKNPKLTDMLTFEFYMPKKATELKHLQCLERELKPLEEVLNLAQSKNFHLRPRDLISNINVIVLELKGSETTFMCEYADETATIVEFLNRWITFCTSIISTLTGGGGSGGGDKTHTCPPCPAPEKKGGPSVFLFPPKPKDTLMISRTPEVTCVVVDVSHEDPEVKFNWYVDGVEVHNAKTKPREEQYNSTYRVVSVLTVLHQDWLNGKEYKCKVSNKALPAPIEKTISKAKGQPREPQVYVLPPSREEMTKNQVSLLCLVKGFYPSDIAVEWESNGQPENRYMTWPPVLDSDGSFFLYSKLTVDKSRWQQGNVFSCSVMHEALHNHYTQKSLSLSPGK

SEQ ID NO: 303 - protein, 573 aa, Artificial Sequence
  Synthetic Construct
LFTVTVPKELYIIEHGSNVTLECNFDTGSHVNLGAITAVLQKVENDTSPHRERATLLEEQLPLGKASFHIPQVQVRDEGQYQCIIIYGVAWDYKYLTLKVKASYRKINTHILKVPETDEVELTCQATGYPLAEVSWPNVSVPANTSHSRTPEGLYQVTSLRLKPPPGRNFSCVFWNTHVRELTLASIDLQSQMEPRTHPTGGGSGAPTSSSTKKTQLQLEHLRLDLEMILNGINNYKNPKLTDMLTFEFYMPKKATELKHLQCLERELKPLEEVLNLAQSKNFHLRPRDLISNINVIVLELKGSETTFMCEYADETATIVEFLNRWITFCTSIISTLTGGGGSGGGDKTHTCPPCPAPEKKGGPSVFLFPPKPKDTLMISRTPEVTCVVVDVSHEDPEVKFNWYVDGVEVHNAKTKPREEQYNSTYRVVSVLTVLHQDWLNGKEYKCKVSNKALPAPIEKTISKAKGQPREPQVYVLPPSREEMTKNQVSLLCLVKGFYPSDIAVEWESNGQPENRYMTWPPVLDSDGSFFLYSKLTVDKSRWQQGNVFSCSVMHEALHNHYTQKSLSLSPGK

SEQ ID NO: 304 - protein, 573 aa, Artificial Sequence
  Synthetic Construct
LFTVTVPKELYIIEHGSNVTLECNFDTGSHVNLGAITAVLQKVENDTSPHRERATLLEEQLPLGKASFHIPQVQVRDEGQYQCIIIYGVAWDYKYLTLKVKASYRKINTHILKVPETDEVELTCQATGYPLAEVSWPNVSVPANTSHSRTPEGLYQVTSLRLKPPPGRNFSCVFWNTHVRELTLASIDLQSQMEPRTHPTGGGSGAPTSSSTKKTQLQLEHLRLDLEMILNGINNYKNPKLTDMLTFEFYMPKKATELKHLQCLERELKPLEEVLNLAQSKNFHLRPRDLISNINVIVLELKGSETTFMCEYADETATIVEFLNRWITFCTSIIRTLTGGGGSGGGDKTHTCPPCPAPEKKGGPSVFLFPPKPKDTLMISRTPEVTCVVVDVSHEDPEVKFNWYVDGVEVHNAKTKPREEQYNSTYRVVSVLTVLHQDWLNGKEYKCKVSNKALPAPIEKTISKAKGQPREPQVYVLPPSREEMTKNQVSLLCLVKGFYPSDIAVEWESNGQPENRYMTWPPVLDSDGSFFLYSKLTVDKSRWQQGNVFSCSVMHEALHNHYTQKSLSLSPGK

SEQ ID NO: 305 - protein, 574 aa, Artificial Sequence
  Synthetic Construct
LFTVTVPKELYIIEHGSNVTLECNFDTGSHVNLGAIVAVLLKVENDTSPHRERATLLEEQLPLGKASFHIPQVQVRDEGQYQCIIIYGVAWDYKYLTLKVKASYRKINTHILKVPETDEVELTCQATGYPLAEVSWPNVSVPANTSHSRTPEGLYQVTSVLRLKPPPGRNFSCVFWNTHVRELTLASIDLQSQMEPRTHPTGGGSGAPTSSSTKKTQLQLEHLRLDLEMILNGINNYKNPKLTDMLTFEFYMPKKATELKHLQCLERELKPLEEVLNLAQSKNFHLRPRDLISNINVIVLELKGSETTFMCEYADETATIVEFLNRWITFCQSIISTLTGGGGSGGGDKTHTCPPCPAPEKKGGPSVFLFPPKPKDTLMISRTPEVTCVVVDVSHEDPEVKFNWYVDGVEVHNAKTKPREEQYNSTYRVVSVLTVLHQDWLNGKEYKCKVSNKALPAPIEKTISKAKGQPREPQVYVLPPSREEMTKNQVSLLCLVKGFYPSDIAVEWESNGQPENRYMTWPPVLDSDGSFFLYSKLTVDKSRWQQGNVFSCSVMHEALHNHYTQKSLSLSPGK

SEQ ID NO: 306 - protein, 574 aa, Artificial Sequence
  Synthetic Construct
LFTVTVPKELYIIEHGSNVTLECNFDTGSHVNLGAIVAVLLKVENDTSPHRERATLLEEQLPLGKASFHIPQVQVRDEGQYQCIIIYGVAWDYKYLTLKVKASYRKINTHILKVPETDEVELTCQATGYPLAEVSWPNVSVPANTSHSRTPEGLYQVTSVLRLKPPPGRNFSCVFWNTHVRELTLASIDLQSQMEPRTHPTGGGSGAPTSSSTKKTQLQLEHLLLDLQMILNGINNYKNPKLTDMLTFEFYMPKKATELKHLQCLERELKPLEEVLNLAQSKNFHLRPRDLISNINVIVLELKGSETTFMCEYADETATIVEFLNRWITFCTSIISTLTGGGGSGGGDKTHTCPPCPAPEKKGGPSVFLFPPKPKDTLMISRTPEVTCVVVDVSHEDPEVKFNWYVDGVEVHNAKTKPREEQYNSTYRVVSVLTVLHQDWLNGKEYKCKVSNKALPAPIEKTISKAKGQPREPQVYVLPPSREEMTKNQVSLLCLVKGFYPSDIAVEWESNGQPENRYMTWPPVLDSDGSFFLYSKLTVDKSRWQQGNVFSCSVMHEALHNHYTQKSLSLSPGK

SEQ ID NO: 307 - protein, 574 aa, Artificial Sequence
  Synthetic Construct
LFTVTVPKELYIIEHGSNVTLECNFDTGSHVNLGAIVAVLLKVENDTSPHRERATLLEEQLPLGKASFHIPQVQVRDEGQYQCIIIYGVAWDYKYLTLKVKASYRKINTHILKVPETDEVELTCQATGYPLAEVSWPNVSVPANTSHSRTPEGLYQVTSVLRLKPPPGRNFSCVFWNTHVRELTLASIDLQSQMEPRTHPTGGGSGAPTSSSTKKTQLQLEHLRLDLEMILNGINNYKNPKLTDMLTFEFYMPKKATELKHLQCLERELKPLEEVLNLAQSKNFHLRPRDLISNINVIVLELKGSETTFMCEYADETATIVEFLNRWITFCTSIISTLTGGGGSGGGDKTHTCPPCPAPEKKGGPSVFLFPPKPKDTLMISRTPEVTCVVVDVSHEDPEVKFNWYVDGVEVHNAKTKPREEQYNSTYRVVSVLTVLHQDWLNGKEYKCKVSNKALPAPIEKTISKAKGQPREPQVYVLPPSREEMTKNQVSLLCLVKGFYPSDIAVEWESNGQPENRYMTWPPVLDSDGSFFLYSKLTVDKSRWQQGNVFSCSVMHEALHNHYTQKSLSLSPGK

SEQ ID NO: 308 - protein, 574 aa, Artificial Sequence
  Synthetic Construct
LFTVTVPKELYIIEHGSNVTLECNFDTGSHVNLGAIVAVLLKVENDTSPHRERATLLEEQLPLGKASFHIPQVQVRDEGQYQCIIIYGVAWDYKYLTLKVKASYRKINTHILKVPETDEVELTCQATGYPLAEVSWPNVSVPANTSHSRTPEGLYQVTSVLRLKPPPGRNFSCVFWNTHVRELTLASIDLQSQMEPRTHPTGGGSGAPTSSSTKKTQLQLEHLRLDLEMILNGINNYKNPKLTDMLTFEFYMPKKATELKHLQCLERELKPLEEVLNLAQSKNFHLRPRDLISNINVIVLELKGSETTFMCEYADETATIVEFLNRWITFCTSIIRTLTGGGGSGGGDKTHTCPPCPAPEKKGGPSVFLFPPKPKDTLMISRTPEVTCVVVDVSHEDPEVKFNWYVDGVEVHNAKTKPREEQYNSTYRVVSVLTVLHQDWLNGKEYKCKVSNKALPAPIEKTISKAKGQPREPQVYVLPPSREEMTKNQVSLLCLVKGFYPSDIAVEWESNGQPENRYMTWPPVLDSDGSFFLYSKLTVDKSRWQQGNVFSCSVMHEALHNHYTQKSLSLSPGK

SEQ ID NO: 309 - protein, 1083 aa, Artificial Sequence
  Synthetic Construct
WPPPGTGDVVVQAPTQVPGFLGDSVTLPCYLQVPNMEVTHVSQLTWARHGESGSMAVFHQTQGPSYSESKRLEFVAARLGAELRNASLRMFGLRVEDEGNYTCLFVTFPQGSRSVDIWLRVLAKPQNTAEVQKVQLTGEPVPMARCVSTGGRPPAQITWHSDLGGMPNTSQVPGFLSGTVTVTSLWILVPSSQVDGKNVTCKVEHESFEKPQLLTVNLTVYYPPEVSISGYDNNWYLGQNEATLTCDARSNPEPTGYNWSTTMGPLPPFAVAQGAQLLIRPVDKPINTTLICNVTNALGARQAELTVQVKEGPPSEHSGISRNGGGGSGGGIWELKKDVYVVELDWYPDAPGEMVVLTCDTPEEDGITWTLDQSSEVLGSGKTLTIQVKAAGDAGQYTCHKGGEVLSHSLLLLHKKEDGIWSTDILKDQKEPKNKTFLRCEAKNYSGRFTCWWLTTISTDLTFSVKSSRGSSDPQGVTCGAATLSAERVRGDNKEYEYSVECQEDSACPAAEESLPIEVMVDAVHKLKYENYTSSFFIRDIIKPDPPKNLQLKPLKNSRQVEVSWEYPDTWSTPHSYFSLTFCVQVQGKSKREKKDRVFTDKTSATVICRKNASISVRAQDRYYSSSWSEWASVPCSGGGGSGGGSGGGGSRNLPVATPDPGMFPCLHHSQNLLRAVSNMLQKARQTLEFYPCTSEEIDHEDITKDKTSTVEACLPLELTKNESCLNSRETSFITNGSCLASRKTSFMMALCLSSIYEDLKMYQVEFKTMNAKLLMDPKRQIFLDQNMLAVIDELMQALNFNSETVPQKSSLEEPDFYKTKIKLCILLHAFRIRAVTIDRVMSYLNASGGGGSGGGDKTHTCPPCPAPEDEGGPSVFLFPPKPKDTLMISRTPEVTCVVVDVSHEDPEVKFNWYVDGVEVHNAKTKPREEQYNSTYRVVSVLTVLHQDWLNGKEYKCKVSNKALPAPIEKTISKAKGQPREPQVYVYPPSREEMTKNQVSLTCLVKGFYPSDIAVEWESNGQPENNYKTTPPVLDEDGSFALVSKLTVDKSRWQQGNVFSCSVMHEALHNHYTQKSLSLSPGK

SEQ ID NO: 310 - protein, 1083 aa, Artificial Sequence
  Synthetic Construct
WPPPGTGDVVVQAPTQVPGFLGDSVTLPCYLQVPNMEVTHVSQLTWARHGESGSMAVFHQTQGPSYSESKRLEFVAARLGAELRNASLRMFGLRVEDEGNYTCLFVTFPQGSRSVDIWLRVLAKPQNTAEVQKVQLTGEPVPMARCVSTGGRPPAQITWHSDLGGMPNTSQVPGFLSGTVTVTSLWILVPSSQVDGKNVTCKVEHESFEKPQLLTVNLTVYYPPEVSISGYDNNWYLGQNEATLTCDARSNPEPTGYNWSTTMGPLPPFAVAQGAQLLIRPVDKPINTTLICNVTNALGARQAELTVQVKEGPPSEHSGISRNGGGGSGGGDKTHTCPPCPAPEDEGGPSVFLFPPKPKDTLMISRTPEVTCVVVDVSHEDPEVKFNWYVDGVEVHNAKTKPREEQYNSTYRVVSVLTVLHQDWLNGKEYKCKVSNKALPAPIEKTISKAKGQPREPQVYVYPPSREEMTKNQVSLTCLVKGFYPSDIAVEWESNGQPENNYKTTPPVLDEDGSFALVSKLTVDKSRWQQGNVFSCSVMHEALHNHYTQKSLSLSPGKGGGGSGGGIWELKKDVYVVELDWYPDAPGEMVVLTCDTPEEDGITWTLDQSSEVLGSGKTLTIQVKAAGDAGQYTCHKGGEVLSHSLLLLHKKEDGIWSTDILKDQKEPKNKTFLRCEAKNYSGRFTCWWLTTISTDLTFSVKSSRGSSDPQGVTCGAATLSAERVRGDNKEYEYSVECQEDSACPAAEESLPIEVMVDAVHKLKYENYTSSFFIRDIIKPDPPKNLQLKPLKNSRQVEVSWEYPDTWSTPHSYFSLTFCVQVQGKSKREKKDRVFTDKTSATVICRKNASISVRAQDRYYSSSWSEWASVPCSGGGGSGGGSGGGGSRNLPVATPDPGMFPCLHHSQNLLRAVSNMLQKARQTLEFYPCTSEEIDHEDITKDKTSTVEACLPLELTKNESCLNSRETSFITNGSCLASRKTSFMMALCLSSIYEDLKMYQVEFKTMNAKLLMDPKRQIFLDQNMLAVIDELMQALNFNSETVPQKSSLEEPDFYKTKIKLCILLHAFRIRAVTIDRVMSYLNAS

SEQ ID NO: 311 - protein, 557 aa, Artificial Sequence
  Synthetic Construct
WPPPGTGDVVVQAPTQVPGFLGDSVTLPCYLQVPNMEVTHVSQLTWARHGESGSMAVFHQTQGPSYSESKRLEFVAARLGAELRNASLRMFGLRVEDEGNYTCLFVTFPQGSRSVDIWLRVLAKPQNTAEVQKVQLTGEPVPMARCVSTGGRPPAQITWHSDLGGMPNTSQVPGFLSGTVTVTSLWILVPSSQVDGKNVTCKVEHESFEKPQLLTVNLTVYYPPEVSISGYDNNWYLGQNEATLTCDARSNPEPTGYNWSTTMGPLPPFAVAQGAQLLIRPVDKPINTTLICNVTNALGARQAELTVQVKEGPPSEHSGISRNGGGGSGGGDKTHTCPPCPAPEDEGGPSVFLFPPKPKDTLMISRTPEVTCVVVDVSHEDPEVKFNWYVDGVEVHNAKTKPREEQYNSTYRVVSVLTVLHQDWLNGKEYKCKVSNKALPAPIEKTISKAKGQPREPQVYVYPPSREEMTKNQSLTCLVKGFYPSDIAVEWESNGQPENNYKTTPPVLDEDGSFALVSKLTVDKSRWQQGNVFSCSVMHEALHNHYTQKSLSLSPGK

SEQ ID NO: 312 - protein, 558 aa, Artificial Sequence
  Synthetic Construct
WPPPGTGDVVVQAPTQVPGFLGDSVTLPCYLQVPNMEVTHVSQLTWARHGESGSMAVFHQTQGPSYSESKRLEFVAARLGAELRNASLRMFGLRVEDEGNYTCLFVTFPQGSRSVDIWLRVLAKPQNTAEVQKVQLTGEPVPMARCVSTGGRPPAQITWHSDLGGMPNTSQVPGFLSGTVTVTSLWILVPSSQVDGKNVTCKVEHESFEKPQLLTVNLTVYYPPEVSISGYDNNWYLGQNEATLTCDARSNPEPTGYNWSTTMGPLPPFAVAQGAQLLIRPVDKPINTTLICNVTNALGARQAELTVQVKEGPPSEHSGISRNGGGGSGGGDKTHTCPPCPAPEKKGGPSVFLFPPKPKDTLMISRTPEVTCVVVDVSHEDPEVKFNWYVDGVEVHNAKTKPREEQYNSTYRVVSVLTVLHQDWLNGKEYKCKVSNKALPAPIEKTISKAKGQPREPQVYVLPPSREEMTKNQVSLLCLVKGFYPSDIAVEWESNGQPENRYMTWPPVLDSDGSFFLYSKLTVDKSRWQQGNVFSCSVMHEALHNHYTQKSLSLSPGK

SEQ ID NO: 313 - protein, 696 aa, Artificial Sequence
  Synthetic Construct
WPPPGTGDVVVQAPTQVPGFLGDSVTLPCYLQVPNMEVTHVSQLTWARHGESGSMAVFHQTQGPSYSESKRLEFVAARLGAELRNASLRMFGLRVEDEGNYTCLFVTFPQGSRSVDIWLRVLAKPQNTAEVQKVQLTGEPVPMARCVSTGGRPPAQITWHSDLGGMPNTSQVPGFLSGTVTVTSLWILVPSSQVDGKNVTCKVEHESFEKPQLLTVNLTVYYPPEVSISGYDNNWYLGQNEATLTCDARSNPEPTGYNWSTTMGPLPPFAVAQGAQLLIRPVDKPINTTLICNVTNALGARQAELTVQVKEGPPSEHSGISRNGGGSGAPTSSSTKKTQLQLEHLRLDLEMILNGINNYKNPKLTDMLTFEFYMPKKATELKHLQCLERELKPLEEVLNLAQSKNFHLRPRDLISNINVIVLELKGSETTFMCEYADETATIVEFLNRWITFCQSIISTLTGGGGSGGGDKTHTCPPCPAPEKKGGPSVFLFPPKPKDTLMISRTPEVTCVVVDVSHEDPEVKFNWYVDGVEVHNAKTKPREEQYNSTYRVVSVLTVLHQDWLNGKEYKCKVSNKALPAPIEKTISKAKGQPREPQVYVLPPSREEMTKNQVSLLCLVKGFYPSDIAVEWESNGQPENRYMTWPPVLDSDGSFFLYSKLTVDKSRWQQGNVFSCSVMHEALHNHYTQKSLSLSPGK

SEQ ID NO: 314 - protein, 696 aa, Artificial Sequence
  Synthetic Construct
WPPPGTGDVVVQAPTQVPGFLGDSVTLPCYLQVPNMEVTHVSQLTWARHGESGSMAVFHQTQGPSYSESKRLEFVAARLGAELRNASLRMFGLRVEDEGNYTCLFVTFPQGSRSVDIWLRVLAKPQNTAEVQKVQLTGEPVPMARCVSTGGRPPAQITWHSDLGGMPNTSQVPGFLSGTVTVTSLWILVPSSQVDGKNVTCKVEHESFEKPQLLTVNLTVYYPPEVSISGYDNNWYLGQNEATLTCDARSNPEPTGYNWSTTMGPLPPFAVAQGAQLLIRPVDKPINTTLICNVTNALGARQAELTVQVKEGPPSEHSGISRNGGGSGAPTSSSTKKTQLQLEHLLLDLQMILNGINNYKNPKLTDMLTFEFYMPKKATELKHLQCLERELKPLEEVLNLAQSKNFHLRPRDLISNINVIVLELKGSETTFMCEYADETATIVEFLNRWITFCTSIISTLTGGGGSGGGDKTHTCPPCPAPEKKGGPSVFLFPPKPKDTLMISRTPEVTCVVVDVSHEDPEVKFNWYVDGVEVHNAKTKPREEQYNSTYRVVSVLTVLHQDWLNGKEYKCKVSNKALPAPIEKTISKAKGQPREPQVYVLPPSREEMTKNQVSLLCLVKGFYPSDIAVEWESNGQPENRYMTWPPVLDSDGSFFLYSKLTVDKSRWQQGNVFSCSVMHEALHNHYTQKSLSLSPGK

SEQ ID NO: 315 - protein, 696 aa, Artificial Sequence
  Synthetic Construct
WPPPGTGDVVVQAPTQVPGFLGDSVTLPCYLQVPNMEVTHVSQLTWARHGESGSMAVFHQTQGPSYSESKRLEFVAARLGAELRNASLRMFGLRVEDEGNYTCLFVTFPQGSRSVDIWLRVLAKPQNTAEVQKVQLTGEPVPMARCVSTGGRPPAQITWHSDLGGMPNTSQVPGFLSGTVTVTSLWILVPSSQVDGKNVTCKVEHESFEKPQLLTVNLTVYYPPEVSISGYDNNWYLGQNEATLTCDARSNPEPTGYNWSTTMGPLPPFAVAQGAQLLIRPVDKPINTTLICNVTNALGARQAELTVQVKEGPPSEHSGISRNGGGSGAPTSSSTKKTQLQLEHLRLDLEMILNGINNYKNPKLTDMLTFEFYMPKKATELKHLQCLERELKPLEEVLNLAQSKNFHLRPRDLISNINVIVLELKGSETTFMCEYADETATIVEFLNRWITFCTSIISTLTGGGGSGGGDKTHTCPPCPAPEKKGGPSVFLFPPKPKDTLMISRTPEVTCVVVDVSHEDPEVKFNWYVDGVEVHNAKTKPREEQYNSTYRVVSVLTVLHQDWLNGKEYKCKVSNKALPAPIEKTISKAKGQPREPQVYVLPPSREEMTKNQVSLLCLVKGFYPSDIAVEWESNGQPENRYMTWPPVLDSDGSFFLYSKLTVDKSRWQQGNVFSCSVMHEALHNHYTQKSLSLSPGK

SEQ ID NO: 316 - protein, 696 aa, Artificial Sequence
  Synthetic Construct
WPPPGTGDVVVQAPTQVPGFLGDSVTLPCYLQVPNMEVTHVSQLTWARHGESGSMAVFHQTQGPSYSESKRLEFVAARLGAELRNASLRMFGLRVEDEGNYTCLFVTFPQGSRSVDIWLRVLAKPQNTAEVQKVQLTGEPVPMARCVSTGGRPPAQITWHSDLGGMPNTSQVPGFLSGTVTVTSLWILVPSSQVDGKNVTCKVEHESFEKPQLLTVNLTVYYPPEVSISGYDNNWYLGQNEATLTCDARSNPEPTGYNWSTTMGPLPPFAVAQGAQLLIRPVDKPINTTLICNVTNALGARQAELTVQVKEGPPSEHSGISRNGGGSGAPTSSSTKKTQLQLEHLRLDLEMILNGINNYKNPKLTDMLTFEFYMPKKATELKHLQCLERELKPLEEVLNLAQSKNFHLRPRDLISNINVIVLELKGSETTFMCEYADETATIVEFLNRWITFCTSIIRTLTGGGGSGGGDKTHTCPPCPAPEKKGGPSVFLFPPKPKDTLMISRTPEVTCVVVDVSHEDPEVKFNWYVDGVEVHNAKTKPREEQYNSTYRVVSVLTVLHQDWLNGKEYKCKVSNKALPAPIEKTISKAKGQPREPQVYVLPPSREEMTKNQVSLLCLVKGFYPSDIAVEWESNGQPENRYMTWPPVLDSDGSFFLYSKLTVDKSRWQQGNVFSCSVMHEALHNHYTQKSLSLSPGK

SEQ ID NO: 317 - protein, 758 aa, Artificial Sequence
  Synthetic Construct
FTVTVPKDLYVVEYGSNMTIECKFPVEKQLDLAALQVYWMMEDKNIIQFVHGEEDLKVQHSSYRQRARLLKDQLSLGNAALQITDVKLQDAGVYTCLIAYKGADYKRITVKVNAPYNKINQRILVVDPVTSEHELTCQAEGYPKAEVIWTSSDHQVLSGKTTTTNSKREEKLFNVTSTLRINTTTNEIFYCTFRRLDPEENHTAELVIPELPLAHPPNERGGGGSGGGQDPYVKEAENLKKYFNAGHSDVVDNGTLFLGILKNWKEESDRKIMQSQIVSFYFKLFKNFKDDQSIQKSVETIKEDMNVKFFNSNKKKRDDFEKLTNYSVTDLNVQRKAIHELIQVMAELSPAAKTGKRKRSQMLFRGGGGSGGGGSGGGGSGGGGSQDPYVKEAENLKKYFNAGHSDVVDNGTLFLGILKNWKEESDRKIMQSQIVSFYFKLFKNFKDDQSIQKSVETIKEDMNVKFFNSNKKKRDDFEKLTNYSVTDLNVQRKAIHELIQVMAELSPAAKTGKRKRSQMLFRGGGGGSGGGDKTHTCPPCPAPEDEGGPSVFLFPPKPKDTLMISRTPEVTCVVVDVSHEDPEVKFNWYVDGVEVHNAKTKPREEQYNSTYRVVSVLTVLHQDWLNGKEYKCKVSNKALPAPIEKTISKAKGQPREPQVYVYPPSREEMTKNQVSLTCLVKGFYPSDIAVEWESNGQPENNYKTTPPVLDEDGSFALVSKLTVDKSRWQQGNVFSCSVMHEALHNHYTQKSLSLSPGK

SEQ ID NO: 318 - protein, 758 aa, Artificial Sequence
  Synthetic Construct
FTVTVPKDLYVVEYGSNMTIECKFPVEKQLDLAALQVYWMMEDKNIIQFVHGEEDLKVQHSSYRQRARLLKDQLSLGNAALQITDVKLQDAGVYTCLIAYGGADYKRITVKVNAPYNKINQRILVVDPVTSEHELTCQAEGYPKAEVIWTSSDHQVLSGKTTTTNSKREEKLFNVTSTLRINTTTNEIFYCTFRRLDPEENHTAELVIPELPLAHPPNERGGGGSGGGQDPYVKEAENLKKYFNAGHSDVVDNGTLFLGILKNWKEESDRKIMQSQIVSFYFKLFKNFKDDQSIQKSVETIKEDMNVKFFNSNKKKRDDFEKLTNYSVTDLNVQRKAIHELIQVMAELSPAAKTGKRKRSQMLFRGGGGSGGGGSGGGGSGGGGSQDPYVKEAENLKKYFNAGHSDVVDNGTLFLGILKNWKEESDRKIMQSQIVSFYFKLFKNFKDDQSIQKSVETIKEDMNVKFFNSNKKKRDDFEKLTNYSVTDLNVQRKAIHELIQVMAELSPAAKTGKRKRSQMLFRGGGGGSGGGDKTHTCPPCPAPEDEGGPSVFLFPPKPKDTLMISRTPEVTCVVVDVSHEDPEVKFNWYVDGVEVHNAKTKPREEQYNSTYRVVSVLTVLHQDWLNGKEYKCKVSNKALPAPIEKTISKAKGQPREPQVYVYPPSREEMTKNQVSLTCLVKGFYPSDIAVEWESNGQPENNYKTTPPVLDEDGSFALVSKLTVDKSRWQQGNVFSCSVMHEALHNHYTQKSLSLSPGK

SEQ ID NO: 319 - protein, 755 aa, Artificial Sequence
  Synthetic Construct
FTVTVPKDLYVVEYGSNMTIECKFPVEKQLDLAALQVYWMMEDKNIIQFVHGEEDLKVQHSSYRQRARLLKDQLSLGNAALQITDVKLQDAGVYTCLIAYKGADYKRITVKVNAPYNKINQRILVVDPVTSEHELTCQAEGYPKAEVIWTSSDHQVLSGKTTTTNSKREEKLFNVTSTLRINTTTNEIFYCTFRRLDPEENHTAELVIPELPLAHPPNERGGGSGQDPYVKEAENLKKYFNAGHSDVVDNGTLFLGILKNWKEESDRKIMQSQIVSFYFKLFKNFKDDQSIQKSVETIKEDMNVKFFNSNKKKRDDFEKLTNYSVTDLNVQRKAIHELIQVMAELSPAAKTGKRKRSQMLFRGGGGSGGGGSGGGGSGGGGSQDPYVKEAENLKKYFNAGHSDVVDNGTLFLGILKNWKEESDRKIMQSQIVSFYFKLFKNFKDDQSIQKSVETIKEDMNVKFFNSNKKKRDDFEKLTNYSVTDLNVQRKAIHELIQVMAELSPAAKTGKRKRSQMLFRGGGGGSGGGDKTHTCPPCPAPEKKGGPSVFLFPPKPKDTLMISRTPEVTCVVVDVSHEDPEVKFNWYVDGVEVHNAKTKPREEQYNSTYRVVSVLTVLHQDWLNGKEYKCKVSNKALPAPIEKTISKAKGQPREPQVYVLPPSREEMTKNQVSLLCLVKGFYPSDIAVEWESNGQPENRYMTWPPVLDSDGSFFLYSKLTVDKSRWQQGNVFSCSVMHEALHNHYTQKSLSLSPGK

SEQ ID NO: 320 - protein, 755 aa, Artificial Sequence
  Synthetic Construct
FTVTVPKDLYVVEYGSNMTIECKFPVEKQLDLAALQVYWMMEDKNIIQFVHGEEDLKVQHSSYRQRARLLKDQLSLGNAALQITDVKLQDAGVYTCLIAYGGADYKRITVKVNAPYNKINQRILVVDPVTSEHELTCQAEGYPKAEVIWTSSDHQVLSGKTTTTNSKREEKLFNVTSTLRINTTTNEIFYCTFRRLDPEENHTAELVIPELPLAHPPNERGGGSGQDPYVKEAENLKKYFNAGHSDVVDNGTLFLGILKNWKEESDRKIMQSQIVSFYFKLFKNFKDDQSIQKSVETIKEDMNVKFFNSNKKKRDDFEKLTNYSVTDLNVQRKAIHELIQVMAELSPAAKTGKRKRSQMLFRGGGGSGGGGSGGGGSGGGGSQDPYVKEAENLKKYFNAGHSDVVDNGTLFLGILKNWKEESDRKIMQSQIVSFYFKLFKNFKDDQSIQKSVETIKEDMNVKFFNSNKKKRDDFEKLTNYSVTDLNVQRKAIHELIQVMAELSPAAKTGKRKRSQMLFRGGGGGSGGGDKTHTCPPCPAPEKKGGPSVFLFPPKPKDTLMISRTPEVTCVVVDVSHEDPEVKFNWYVDGVEVHNAKTKPREEQYNSTYRVVSVLTVLHQDWLNGKEYKCKVSNKALPAPIEKTISKAKGQPREPQVYVLPPSREEMTKNQVSLLCLVKGFYPSDIAVEWESNGQPENRYMTWPPVLDSDGSFFLYSKLTVDKSRWQQGNVFSCSVMHEALHNHYTQKSLSLSPGK

SEQ ID NO: 321 - protein, 739 aa, Artificial Sequence
  Synthetic Construct
LFTVTVPKELYIIEHGSNVTLECNFDTGSHVNLGAITAVLQKVENDTSPHRERATLLEEQLPLGKASFHIPQVQVRDEGQYQCIIIYGVAWDYKYLTLKVKASYRKINTHILKVPETDEVELTCQATGYPLAEVSWPNVSVPANTSHSRTPEGLYQVTSVLRLKPPPGRNFSCVFWNTHVRELTLASIDLQSQMEPRTHPTGGGGSGGGQDPYVKEAENLKKYFNAGHSDVVDNGTLFLGILKNWKEESDRKIMQSQIVSFYFKLFKNFKDDQSIQKSVETIKEDMNVKFFNSNKKKRDDFEKLTNYSVTDLNVQRKAIHELIQVMAELSPAAKTGKRKRSQMLFRGGGGSGGGGSGGGGSGGGGSQDPYVKEAENLKKYFNAGHSDVVDNGTLFLGILKNWKEESDRKIMQSQIVSFYFKLFKNFKDDQSIQKSVETIKEDMNVKFFNSNKKKRDDFEKLTNYSVTDLNVQRKAIHELIQVMAELSPAAKTGKRKRSQMLFRGGGGGSGGGDKTHTCPPCPAPEDEGGPSVFLFPPKPKDTLMISRTPEVTCVVVDVSHEDPEVKFNWYVDGVEVHNAKTKPREEQYNSTYRVVSVLTVLHQDWLNGKEYKCKVSNKALPAPIEKTISKAKGQPREPQVYVYPPSREEMTKNQVSLTCLVKGFYPSDIAVEWESNGQPENNYKTTPPVLDEDGSFALVSKLTVDKSRWQQGNVFSCSVMHEALHNHYTQKSLSLSPGK

SEQ ID NO: 322 - protein, 739 aa, Artificial Sequence
  Synthetic Construct
LFTVTVPKELYIIEHGSNVTLECNFDTGSHVNLGAIVAVLLKVENDTSPHRERATLLEEQLPLGKASFHIPQVQVRDEGQYQCIIIYGVAWDYKYLTLKVKASYRKINTHILKVPETDEVELTCQATGYPLAEVSWPNVSVPANTSHSRTPEGLYQVTSVLRLKPPPGRNFSCVFWNTHVRELTLASIDLQSQMEPRTHPTGGGGSGGGQDPYVKEAENLKKYFNAGHSDVVDNGTLFLGILKNWKEESDRKIMQSQIVSFYFKLFKNFKDDQSIQKSVETIKEDMNVKFFNSNKKKRDDFEKLTNYSVTDLNVQRKAIHELIQVMAELSPAAKTGKRKRSQMLFRGGGGSGGGGSGGGGSGGGGSQDPYVKEAENLKKYFNAGHSDVVDNGTLFLGILKNWKEESDRKIMQSQIVSFYFKLFKNFKDDQSIQKSVETIKEDMNVKFFNSNKKKRDDFEKLTNYSVTDLNVQRKAIHELIQVMAELSPAAKTGKRKRSQMLFRGGGGGSGGGDKTHTCPPCPAPEDEGGPSVFLFPPKPKDTLMISRTPEVTCVVVDVSHEDPEVKFNWYVDGVEVHNAKTKPREEQYNSTYRVVSVLTVLHQDWLNGKEYKCKVSNKALPAPIEKTISKAKGQPREPQVYVYPPSREEMTKNQVSLTCLVKGFYPSDIAVEWESNGQPENNYKTTPPVLDEDGSFALVSKLTVDKSRWQQGNVFSCSVMHEALHNHYTQKSLSLSPGK

SEQ ID NO: 323 - protein, 736 aa, Artificial Sequence
  Synthetic Construct
LFTVTVPKELYIIEHGSNVTLECNFDTGSHVNLGAITAVLQKVENDTSPHRERATLLEEQLPLGKASFHIPQVQVRDEGQYQCIIIYGVAWDYKYLTLKVKASYRKINTHILKVPETDEVELTCQATGYPLAEVSWPNVSVPANTSHSRTPEGLYQVTSVLRLKPPPGRNFSCVFWNTHVRELTLASIDLQSQMEPRTHPTGGGSGQDPYVKEAENLKKYFNAGHSDVVDNGTLFLGILKNWKEESDRKIMQSQIVSFYFKLFKNFKDDQSIQKSVETIKEDMNVKFFNSNKKKRDDFEKLTNYSVTDLNVQRKAIHELIQVMAELSPAAKTGKRKRSQMLFRGGGGSGGGGSGGGGSGGGGSQDPYVKEAENLKKYFNAGHSDVVDNGTLFLGILKNWKEESDRKIMQSQIVSFYFKLFKNFKDDQSIQKSVETIKEDMNVKFFNSNKKKRDDFEKLTNYSVTDLNVQRKAIHELIQVMAELSPAAKTGKRKRSQMLFRGGGGGSGGGDKTHTCPPCPAPEKKGGPSVFLFPPKPKDTLMISRTPEVTCVVVDVSHEDPEVKFNWYVDGVEVHNAKTKPREEQYNSTYRVVSVLTVLHQDWLNGKEYKCKVSNKALPAPIEKTISKAKGQPREPQVYVLPPSREEMTKNQVSLLCLVKGFYPSDIAVEWESNGQPENRYMTWPPVLDSDGSFFLYSKLTVDKSRWQQGNVFSCSVMHEALHNHYTQKSLSLSPGK

SEQ ID NO: 324 - protein, 736 aa, Artificial Sequence
  Synthetic Construct
LFTVTVPKELYIIEHGSNVTLECNFDTGSHVNLGAIVAVLLKVENDTSPHRERATLLEEQLPLGKASFHIPQVQVRDEGQYQCIIIYGVAWDYKYLTLKVKASYRKINTHILKVPETDEVELTCQATGYPLAEVSWPNVSVPANTSHSRTPEGLYQVTSVLRLKPPPGRNFSCVFWNTHVRELTLASIDLQSQMEPRTHPTGGGSGQDPYVKEAENLKKYFNAGHSDVVDNGTLFLGILKNWKEESDRKIMQSQIVSFYFKLFKNFKDDQSIQKSVETIKEDMNVKFFNSNKKKRDDFEKLTNYSVTDLNVQRKAIHELIQVMAELSPAAKTGKRKRSQMLFRGGGGSGGGGSGGGGSGGGGSQDPYVKEAENLKKYFNAGHSDVVDNGTLFLGILKNWKEESDRKIMQSQIVSFYFKLFKNFKDDQSIQKSVETIKEDMNVKFFNSNKKKRDDFEKLTNYSVTDLNVQRKAIHELIQVMAELSPAAKTGKRKRSQMLFRGGGGGSGGGDKTHTCPPCPAPEKKGGPSVFLFPPKPKDTLMISRTPEVTCVVVDVSHEDPEVKFNWYVDGVEVHNAKTKPREEQYNSTYRVVSVLTVLHQDWLNGKEYKCKVSNKALPAPIEKTISKAKGQPREPQVYVLPPSREEMTKNQVSLLCLVKGFYPSDIAVEWESNGQPENRYMTWPPVLDSDGSFFLYSKLTVDKSRWQQGNVFSCSVMHEALHNHYTQKSLSLSPGK

SEQ ID NO: 325 - protein, 861 aa, Artificial Sequence
  Synthetic Construct
WPPPGTGDVVVQAPTQVPGFLGDSVTLPCYLQVPNMEVTHVSQLTWARHGESGSMAVFHQTQGPSYSESKRLEFVAARLGAELRNASLRMFGLRVEDEGNYTCLFVTFPQGSRSVDIWLRVLAKPQNTAEVQKVQLTGEPVPMARCVSTGGRPPAQITWHSDLGGMPNTSQVPGFLSGTVTVTSLWILVPSSQVDGKNVTCKVEHESFEKPQLLTVNLTVYYPPEVSISGYDNNWYLGQNEATLTCDARSNPEPTGYNWSTTMGPLPPFAVAQGAQLLIRPVDKPINTTLICNVTNALGARQAELTVQVKEGPPSEHSGISRNGGGGSGGGQDPYVKEAENLKKYFNAGHSDVVDNGTLFLGILKNWKEESDRKIMQSQIVSFYFKLFKNFKDDQSIQKSVETIKEDMNVKFFNSNKKKRDDFEKLTNYSVTDLNVQRKAIHELIQVMAELSPAAKTGKRKRSQMLFRGGGGSGGGGSGGGGSGGGGSQDPYVKEAENLKKYFNAGHSDVVDNGTLFLGILKNWKEESDRKIMQSQIVSFYFKLFKNFKDDQSIQKSVETIKEDMNVKFFNSNKKKRDDFEKLTNYSVTDLNVQRKAIHELIQVMAELSPAAKTGKRKRSQMLFRGGGGGSGGGDKTHTCPPCPAPEDEGGPSVFLFPPKPKDTLMISRTPEVTCVVVDVSHEDPEVKFNWYVDGVEVHNAKTKPREEQYNSTYRVVSVLTVLHQDWLNGKEYKCKVSNKALPAPIEKTISKAKGQPREPQVYVYPPSREEMTKNQVSLTCLVKGFYPSDIAVEWESNGQPENNYKTTPPVLDEDGSFALVSKLTVDKSRWQQGNVFSCSVMHEALHNHYTQKSLSLSPGK

SEQ ID NO: 326 - protein, 858 aa, Artificial Sequence
  Synthetic Construct
WPPPGTGDVVVQAPTQVPGFLGDSVTLPCYLQVPNMEVTHVSQLTWARHGESGSMAVFHQTQGPSYSESKRLEFVAARLGAELRNASLRMFGLRVEDEGNYTCLFVTFPQGSRSVDIWLRVLAKPQNTAEVQKVQLTGEPVPMARCVSTGGRPPAQITWHSDLGGMPNTSQVPGFLSGTVTVTSLWILVPSSQVDGKNVTCKVEHESFEKPQLLTVNLTVYYPPEVSISGYDNNWYLGQNEATLTCDARSNPEPTGYNWSTTMGPLPPFAVAQGAQLLIRPVDKPINTTLICNVTNALGARQAELTVQVKEGPPSEHSGISRNGGGSGQDPYVKEAENLKKYFNAGHSDVVDNGTLFLGILKNWKEESDRKIMQSQIVSFYFKLFKNFKDDQSIQKSVETIKEDMNVKFFNSNKKKRDDFEKLTNYSVTDLNVQRKAIHELIQVMAELSPAAKTGKRKRSQMLFRGGGGSGGGGSGGGGSGGGGSQDPYVKEAENLKKYFNAGHSDVVDNGTLFLGILKNWKEESDRKIMQSQIVSFYFKLFKNFKDDQSIQKSVETIKEDMNVKFFNSNKKKRDDFEKLTNYSVTDLNVQRKAIHELIQVMAELSPAAKTGKRKRSQMLFRGGGGGSGGGDKTHTCPPCPAPEKKGGPSVFLFPPKPKDTLMISRTPEVTCVVVDVSHEDPEVKFNWYVDGVEVHNAKTKPREEQYNSTYRVVSVLTVLHQDWLNGKEYKCKVSNKALPAPIEKTISKAKGQPREPQVYVLPPSREEMTKNQVSLLCLVKGFYPSDIAVEWESNGQPENRYMTWPPVLDSDGSFFLYSKLTVDKSRWQQGNVFSCSVMHEALHNHYTQKSLSLSPGK

SEQ ID NO: 327 - protein, 593 aa, Artificial Sequence
  Synthetic Construct
FTVTVPKDLYVVEYGSNMTIECKFPVEKQLDLAALQVYWMMEDKNIIQFVHGEEDLKVQHSSYRQRARLLKDQLSLGNAALQITDVKLQDAGVYTCLIAYKGADYKRITVKVNAPYNKINQRILVVDPVTSEHELTCQAEGYPKAEVIWTSSDHQVLSGKTTTTNSKREEKLFNVTSTLRINTTTNEIFYCTFRRLDPEENHTAELVIPELPLAHPPNERGGGSGAPTSSSTKKTQLQLEHLLLDLQMILNGINNYKNPKLTDMLTFEFYMPKKATELKHLQCLERELKPLEEVLNLAQSKNFHLRPRDLISNINVIVLELKGSETTFMCEYADETATIVEFLNRWITFCQSIISTLTGGGGSGGGDKTHTCPPCPAPEKKGGPSVFLFPPKPKDTLMISRTPEVTCVVVDVSHEDPEVKFNWYVDGVEVHNAKTKPREEQYNSTYRVVSVLTVLHQDWLNGKEYKCKVSNKALPAPIEKTISKAKGQPREPQVYVLPPSREEMTKNQVSLLCLVKGFYPSDIAVEWESNGQPENRYMTWPPVLDSDGSFFLYSKLTVDKSRWQQGNVFSCSVMHEALHNHYTQKSLSLSPGK

SEQ ID NO: 328 - protein, 987 aa, Artificial Sequence
  Synthetic Construct
FTVTVPKDLYVVEYGSNMTIECKFPVEKQLDLAALQVYWMMEDKNIIQFVHGEEDLKVQHSSYRQRARLLKDQLSLGNAALQITDVKLQDAGVYTCLIAYKGADYKRITVKVNAPYNKINQRILVVDPVTSEHELTCQAEGYPKAEVIWTSSDHQVLSGKTTTTNSKREEKLFNVTSTLRINTTTNEIFYCTFRRLDPEENHTAELVIPELPLAHPPNERGGGGSGGGMWELEKDVYVVEVDWTPDAPGETVNLTCDTPEEDDITWTSDQRHGVIGSGKTLTITVKAALDAGQYTCHKGGETLSHSHLLLHKKENGIWSTEILKNFKNKTFLKCEAPNYSGRFTCSWLVQRNMDLKFNIKSSSSSPDSRAVTCGMASLSAEKVTLDQRDYEKYSVSCQEDVTCPTAEETLPIELALEARQQNKYENYSTSFFIRDIIKPDPPKNLQMKPLKNSQVEVSWEYPDSWSTPHSYFSLKFFVRIQRKKEKMKETEEGCNQKGAFLVEKTSTEVQCKGGNVCVQAQDRYYNSSCSKWACVPCRVRSGGPGGGGSGGGSGGGGSGRVIPVSGPARCLSQSRNLLKTTDDMVKTAREKLKHYSCTAEDIDHEDITRDQTSTLKTCLPLELHKNESCLATRETSSTTRGSCLPPQKTSLMMTLCLGSIYEDLKMYQTEFQAINAALQNHNHQQIILDKGMLVAIDELMQSLNHNGETLRQKPPVGEADPYRVKMKLCILLHAFSTRVVTINRVMGYLSSAGGGGSGGGDKTHTCPPCPAPEDEGGPSVFLFPPKPKDTLMISRTPEVTCVVVDVSHEDPEVKFNWYVDGVEVHNAKTKPREEQYNSTYRVVSVLTVLHQDWLNGKEYKCKVSNKALPAPIEKTISKAKGQPREPQVYVYPPSREEMTKNQVSLTCLVKGFYPSDIAVEWESNGQPENNYKTTPPVLDEDGSFALVSKLTVDKSRWQQGNVFSCSVMHEALHNHYTQKSLSLSPGK

SEQ ID NO: 329 - protein, 987 aa, Artificial Sequence
  Synthetic Construct
FTVTVPKDLYVVEYGSNMTIECKFPVEKQLDLAALQVYWMMEDKNIIQFVHGEEDLKVQHSSYRQRARLLKDQLSLGNAALQITDVKLQDAGVYTCLIAYKGADYKRITVKVNAPYNKINQRILVVDPVTSEHELTCQAEGYPKAEVIWTSSDHQVLSGKTTTTNSKREEKLFNVTSTLRINTTTNEIFYCTFRRLDPEENHTAELVIPELPLAHPPNERGGGGSGGGDKTHTCPPCPAPEDEGGPSVFLFPPKPKDTLMISRTPEVTCVVVDVSHEDPEVKFNWYVDGVEVHNAKTKPREEQYNSTYRVVSVLTVLHQDWLNGKEYKCKVSNKALPAPIEKTISKAKGQPREPQVYVYPPSREEMTKNQVSLTCLVKGFYPSDIAVEWESNGQPENNYKTTPPVLDEDGSFALVSKLTVDKSRWQQGNVFSCSVMHEALHNHYTQKSLSLSPGKGGGGSGGGMWELEKDVYVVEVDWTPDAPGETVNLTCDTPEEDDITWTSDQRHGVIGSGKTLTITVKAALDAGQYTCHKGGETLSHSHLLLHKKENGIWSTEILKNFKNKTFLKCEAPNYSGRFTCSWLVQRNMDLKFNIKSSSSSPDSRAVTCGMASLSAEKVTLDQRDYEKYSVSCQEDVTCPTAEETLPIELALEARQQNKYENYSTSFFIRDIIKPDPPKNLQMKPLKNSQVEVSWEYPDSWSTPHSYFSLKFFVRIQRKKEKMKETEEGCNQKGAFLVEKTSTEVQCKGGNVCVQAQDRYYNSSCSKWACVPCRVRSGGPGGGGSGGGSGGGGSGRVIPVSGPARCLSQSRNLLKTTDDMVKTAREKLKHYSCTAEDIDHEDITRDQTSTLKTCLPLELHKNESCLATRETSSTTRGSCLPPQKTSLMMTLCLGSIYEDLKMYQTEFQAINAALQNHNHQQIILDKGMLVAIDELMQSLNHNGETLRQKPPVGEADPYRVKMKLCILLHAFSTRVVTINRVMGYLSSA

SEQ ID NO: 330 - protein, 524 aa, Artificial Sequence
  Synthetic Construct
MWELEKDVYVVEVDWTPDAPGETVNLTCDTPEEDDITWTSDQRHGVIGSGKTLTITVKAALDAGQYTCHKGGETLSHSHLLLHKKENGIWSTEILKNFKNKTFLKCEAPNYSGRFTCSWLVQRNMDLKFNIKSSSSSPDSRAVTCGMASLSAEKVTLDQRDYEKYSVSCQEDVTCPTAEETLPIELALEARQQNKYENYSTSFFIRDIIKPDPPKNLQMKPLKNSQVEVSWEYPDSWSTPHSYFSLKFFVRIQRKKEKMKETEEGCNQKGAFLVEKTSTEVQCKGGNVCVQAQDRYYNSSCSKWACVPCRVRSGGPGGGGSGGGSGGGGSGRVIPVSGPARCLSQSRNLLKTTDDMVKTAREKLKHYSCTAEDIDHEDITRDQTSTLKTCLPLELHKNESCLATRETSSTTRGSCLPPQKTSLMMTLCLGSIYEDLKMYQTEFQAINAALQNHNHQQIILDKGMLVAIDELMQSLNHNGETLRQKPPVGEADPYRVKMKLCILLHAFSTRVVTINRVMGYLSSA

SEQ ID NO: 331 - protein, 524 aa, Artificial Sequence
  Synthetic Construct
IWELKKDVYVVELDWYPDAPGEMVVLTCDTPEEDGITWTLDQSSEVLGSGKTLTIQVKAFGDAGQYTCHKGGEVLSHSLLLLHKKEDGIWSTDILKDQKEPKNKTFLRCEAKNYSGRFTCWWLTTISTDLTFSVKSSRGSSDPQGVTCGAATLSAERVRGDNKEYEYSVECQEDSACPAAEESLPIEVMVDAVHKLKYENYTSSFFIRDIIKPDPPKNLQLKPLKNSRQVEVSWEYPDTWSTPHSYFSLTFCVQVQGKSKREKKDRVFTDKTSATVICRKNASISVRAQDRYYSSSWSEWASVPCSGGGGSGGGGSGGGGSGGGGSGRNLPVATPDPGMFPCLHHSQNLLRAVSNMLQKARQTLEFYPCTSEEIDHEDITKDKTSTVEACLPLELTKNESCLNSRETSFITNGSCLASRKTSFMMALCLSSIYEDLKMYQVEFKTMNAKLLMDPKRQIFLDQNMLAVIDELMQALNFNSETVPQKSSLEEPDFYKTKIKLCILLHAFRIRAVTIDRVMSYLNAS

SEQ ID NO: 332 - protein, 524 aa, Artificial Sequence
  Synthetic Construct
IWELKKDVYVVELDWYPDAPGEMVVLTCDTPEEDGITWTLDQSSEVLGSGKTLTIQVKEFGDAAQYTCHKGGEVLSHSLLLLHKKEDGIWSTDILKDQKEPKNKTFLRCEAKNYSGRFTCWWLTTISTDLTFSVKSSRGSSDPQGVTCGAATLSAERVRGDNKEYEYSVECQEDSACPAAEESLPIEVMVDAVHKLKYENYTSSFFIRDIIKPDPPKNLQLKPLKNSRQVEVSWEYPDTWSTPHSYFSLTFCVQVQGKSKREKKDRVFTDKTSATVICRKNASISVRAQDRYYSSSWSEWASVPCSGGGGSGGGGSGGGGSGGGGSGRNLPVATPDPGMFPCLHHSQNLLRAVSNMLQKARQTLEFYPCTSEEIDHEDITKDKTSTVEACLPLELTKNESCLNSRETSFITNGSCLASRKTSFMMALCLSSIYEDLKMYQVEFKTMNAKLLMDPKRQIFLDQNMLAVIDELMQALNFNSETVPQKSSLEEPDFYKTKIKLCILLHAFRIRAVTIDRVMSYLNAS

SEQ ID NO: 333 - protein, 13 aa, Artificial Sequence
  Synthetic Construct
GGGGSGGGSGGGG

SEQ ID NO: 334 - protein, 8 aa, Artificial Sequence
  Synthetic Construct
GGGGSGGG

SEQ ID NO: 335 - protein, 16 aa, Artificial Sequence
  Synthetic Construct
GGPGGGGSGGGSGGGG

1. An immunocytokine comprising: a) an antigen-binding protein specifically recognizing a target antigen; and b) a cytokine or variant thereof, wherein the antigen-binding protein comprises an antigen-binding polypeptide comprising from N′ to C′: an antigen-binding fragment, a hinge region, and an Fc domain subunit or portion thereof, and wherein the cytokine or variant thereof is positioned at the hinge region;
and wherein the target antigen is PD-1:
and the antigen-binding protein specifically binds the target antigen with a KD within a range of 10⁻⁸M<KD≤10⁻⁶M.

2. The immunocytokine of claim 1, wherein in the presence of binding of the antigen-binding protein to the target antigen, the activity of the cytokine or variant thereof increases at least about 20% compared to that in the absence of binding of the antigen-binding protein to the target antigen.

3. The immunocytokine of claim 1, wherein in the absence of binding of the antigen-binding protein to the target antigen, the activity of the cytokine or variant thereof positioned at the hinge region is no more than about 70% of that of a corresponding cytokine or variant thereof in a free state.

4. The immunocytokine of claim 1, wherein the cytokine or variant thereof is a cytokine variant, and wherein the activity of the cytokine variant in a free state is no more than about 80% of that of a corresponding wildtype cytokine in a free state.

5. The immunocytokine of claim 1, wherein the antigen-binding protein comprises two antigen-binding polypeptides each comprising a hinge region, and wherein only one antigen-binding polypeptide comprises the cytokine or variant thereof positioned at the hinge region.

6. The immunocytokine of claim 1, wherein the antigen-binding protein comprises two antigen-binding polypeptides each comprising a hinge region, and wherein each antigen-binding polypeptide comprises a cytokine or variant thereof positioned at the hinge region, and the two cytokines or variants thereof are the same or different.

7. (canceled)

8. The immunocytokine of claim 1, wherein the cytokine or variant thereof is a monomeric or dimeric cytokine or variant thereof, and when the cytokine or variant thereof is dimeric, both subunits of the dimeric cytokine or variant thereof are positioned in tandem at the hinge region of the antigen-binding polypeptide.

9-15. (canceled)

16. The immunocytokine of claim 1, wherein the antigen-binding fragment is L2 or PD-L1.

17. The immunocytokine of claim 1, wherein the cytokine or variant thereof is selected from the group consisting of IL-1, IL-2, IL-3, IL-4, IL-5, IL-6, IL-7, IL-8, IL-9, IL-10, IL-12, IL-15, IL-17, IL-18, IL-21, IL-22, IL-23, IL-27, IL-35, IFN-α, IFN-β, IFN-γ, TNF-α, TGF-β, VEGF, erythropoietin, thrombopoietin, G-CSF, M-CSF, SCF, and GM-CSF.

18. (canceled)

19. The immunocytokine of claim 17, wherein the cytokine or variant thereof is IL-2 or variant thereof.

20. The immunocytokine of claim 19, wherein the IL-2 variant comprises one or more mutations at a position selected from the group consisting of L18, Q22, F24, K35, R38, F42, K43, E61, P65, Q126, and S130 relative to a wildtype IL-2 comprising the sequence of SEQ ID NO: 1.

21-47. (canceled)

48. The immunocytokine of claim 17, wherein the cytokine or variant thereof is IL-12 or variant thereof.

49. The immunocytokine of claim 48, wherein the IL-12 variant comprises one or more mutations within the p40 subunit at a position selected from the group consisting of E45, Q56, V57, K58, E59, F60, G61, D62, A63, G64, Q65, and C177 relative to a wildtype p40 subunit comprising the sequence of SEQ ID NO: 30.

50-51. (canceled)

52. The immunocytokine of claim 49, wherein the IL-12 variant comprises an E59A/F60A mutation or an E59A mutation or an F60A mutation within the p40 subunit relative to a wildtype p40 subunit comprising the sequence of SEQ ID NO: 30.

53. The immunocytokine of claim 52, wherein the p40 subunit of the IL-12 variant comprises the sequence of SEQ ID NO: 31, 32 or 33.

54. The immunocytokine of claim 48, wherein the p40 subunit and the p35 subunit of the IL-12 or variant thereof are connected by a linker.

55. The immunocytokine of claim 54, wherein the IL-12 variant comprises the sequence of SEQ ID NO: 36, 275, 331, or 332.

56-66. (canceled)

67. The immunocytokine of claim 1, wherein the antigen-binding protein is an antibody specifically recognizing PD1, wherein the antigen-binding polypeptide comprising the hinge region is a heavy chain of the antibody, and wherein the cytokine or variant thereof is positioned at the hinge region of the heavy chain.

68-99. (canceled)

100. The immunocytokine of claim 67, wherein the antibody is an anti-PD-1 antibody comprising VH-CDR1 and VH-CDR2, and VH-CDR3 of a VH comprising the sequence of SEQ ID NO: 102, and VL-CDR1, VL-CDR2, and VL-CDR3 of a VL comprising the sequence of SEQ ID NO: 103, and wherein the VH-CDR3 comprises any one of following mutations relative to SEQ ID NO: 102: D100N, D100G, D100R, N99G, N99A, or N99M.

101. The immunocytokine of claim 100, wherein the antibody comprises a light chain comprising the sequence of SEQ ID NO: 106, wherein the cytokine or variant thereof is an IL-12 variant comprising the sequence of SEQ ID NO: 36, and wherein the heavy chain comprising the IL-12 variant positioned at the hinge region comprises the sequence of any one of SEQ ID NOs: 268-273.

102-103. (canceled)

104. The immunocytokine of claim 16, wherein the PD-L2 or PD-L1 comprises the sequence of SEQ ID NO: 176, SEQ ID NO:250, any of SEQ ID NOs: 255-261 or any of SEQ ID NOs: 262-265.

105. The immunocytokine of claim 104,
(i) wherein the cytokine or variant thereof is an IL-2 variant comprising the sequence of SEQ ID NO: 2, and wherein the antigen-binding polypeptide comprising the IL-2 variant positioned at the hinge region comprises the sequence of SEQ ID NO: 180;
(ii) wherein the cytokine or variant thereof is an IFN-α variant comprising the sequence of SEQ ID NO: 4, and wherein the antigen-binding polypeptide comprising the IFN-α variant positioned at the hinge region comprises the sequence of SEQ ID NO: 182;
(iii) wherein the cytokine or variant thereof is an INF-7 variant comprising the sequence of SEQ ID NO: 19, and wherein the antigen-binding polypeptide comprising the IFN-γ variant positioned at the hinge region comprises the sequence of SEQ ID NO: 183;
(iv) wherein the cytokine or variant thereof is an IL-10 variant comprising the sequence of SEQ ID NO: 28, and wherein the antigen-binding polypeptide comprising the IL-10 variant positioned at the hinge region comprises the sequence of SEQ ID NO: 184;
(v) wherein the cytokine or variant thereof is an IL-12 variant comprising the sequence of SEQ ID NO: 36, and wherein the antigen-binding polypeptide comprising the IL-12 variant positioned at the hinge region comprises the sequence of SEQ ID NO: 186;
(vi) wherein the cytokine or variant thereof is an IL-12 variant comprising the sequence of SEQ ID NO: 275, and wherein the antigen-binding polypeptide comprising the IL-12 variant positioned at the hinge region comprises the sequence of SEQ ID NO: 274; or
(vii) wherein the cytokine or variant thereof is an IL-23 variant comprising the sequence of SEQ ID NO: 39, and wherein the antigen-binding polypeptide comprising the IL-23 variant positioned at the hinge region comprises the sequence of SEQ ID NO: 187.

106. The immunocytokine of claim 105, wherein the antigen-binding protein comprises a second antigen-binding polypeptide not comprising the cytokine or variant thereof positioned at the hinge region, and wherein the second antigen-binding polypeptide comprises the sequence of any of SEQ ID NOs: 178, 179, 181, and 185.

107-118. (canceled)

119. An isolated nucleic acid encoding the immunocytokine of claim 1.

120-123. (canceled)

124. A pharmaceutical composition comprising the immunocytokine of claim 1, and optionally a pharmaceutical acceptable carrier.

125. A method of treating or preventing a disease or disorder in an individual, comprising administering to the individual an effective amount of the immunocytokine of claim 1.

126-128. (canceled)

129. The method of claim 125, wherein the disease or disorder is a cancer.

130. The method of claim 129, wherein the cancer is selected from the group consisting of lung cancer, liver cancer, renal cancer, colorectal cancer, ovarian cancer, breast cancer, pancreatic cancer, gastric carcinoma, bile duct cancer, squamous cell carcinoma, bladder cancer, esophageal cancer, mesothelioma, melanoma, head and neck cancer, thyroid cancer, sarcoma, prostate cancer, glioblastoma, cervical cancer, thymic carcinoma, leukemia, lymphoma, myeloma, mycoses fungoides, and merkel cell cancer.

131-134. (canceled)
